(19) United States
(12) Patent Application Publication
(10) Pub. No.: US 2010/0297152 A1
(43) Pub. Date: Nov. 25, 2010

(54) METHODS OF DIAGNOSIS OF PROSTATE CANCER, COMPOSITIONS AND METHODS OF SCREENING FOR MODULATORS OF PROSTATE CANCER

(75) Inventor: David B. Agus, Los Angeles, CA (US)

Correspondence Address: DAVIS WRIGHT TREMAINE LLP/Los Angeles, 865 FIGUEROA STREET, SUITE 2400, LOS ANGELES, CA, 90017-2566, US

(73) Assignee: CEDARS-SINAI MEDICAL CENTER, Los Angeles, CA (US)

(21) Appl. No.: 12/345,877

(22) Filed: Dec. 30, 2008

Related U.S. Application Data
(63) Continuation of application No. 11/212,799, filed on Aug. 24, 2005, now abandoned.
Application No. 11/212,799 is a division of application No. 09/976,858, filed on Oct. 12, 2001, now abandoned.
Application No. 09/976,858 is a continuation-in-part of application No. 09/847,046, filed on Apr. 30, 2001, now abandoned.
Application No. 09/847,046 is a continuation-in-part of application No. 09/733,288, filed on Dec. 8, 2000, now abandoned.
Application No. 09/733,288 is a continuation-in-part of application No. 09/733,742, filed on Dec. 8, 2000, now abandoned.
Application No. 09/733,742 is a continuation-in-part of application No. 09/687,576, filed on Oct. 13, 2000, now abandoned.
(60) Provisional application No. 60/288,589, filed on May 4, 2001.
(60) Provisional application No. 60/286,214, filed on Apr. 24, 2001.
(60) Provisional application No. 60/281,922, filed on Apr. 6, 2001.
(60) Provisional application No. 60/276,791, filed on Mar. 16, 2001.
(60) Provisional application No. 60/276,888, filed on Mar. 16, 2001.
(60) Provisional application No. 60/263,957, filed on Jan. 24, 2001.

(51) Int. Cl. A61K 39/395; C12Q 1/68; G01N 33/68; C07H 21/04; C12N 15/63; C12N 5/10; C07K 2/00; C07K 16/46; C07K 16/18; C40B 40/06; A61P 35/00

(52) U.S. Cl. 424/174.1; 435/6; 435/7.1; 536/23.1; 435/320.1; 435/325; 530/300; 530/350; 530/387.3; 530/389.1; 436/86; 506/16

(57) ABSTRACT

Described herein are genes whose expression are up-regulated or down-regulated in prostate cancer. Also described are such genes whose expression is further up-regulated or down-regulated in drug-resistant prostate cancer cells. Related methods and compositions that can be used for diagnosis and treatment of prostate cancer are disclosed. Also described herein are methods that can be used to identify modulators of prostate cancer.

### CROSS-REFERENCES TO RELATED APPLICATIONS

[0001] This application claims priority from the following applications: U.S. Ser. No. 09/687,576 filed Oct. 13, 2000, U.S. Ser. No. 60/276,791 filed Mar. 16, 2001; U.S. Ser. No. 60/288,589, filed May 4, 2001; U.S. Ser. No. 09/733,742, filed Dec. 8, 2000; U.S. Ser. No. 09/733,288, filed Dec. 8, 2000; U.S. Ser. No. 09/847,046, filed Apr. 30, 2001; U.S. Ser. No. 60/276,888, filed Mar. 16, 2001; U.S. Ser. No. 60/286,214, filed Apr. 24, 2001; U.S. Ser. No. 60/281,922, filed Apr. 6, 2001; U.S. Ser. No. 60/263,957, filed Jan. 24, 2001, which are incorporated herein by reference in their entirety.

### FIELD OF THE INVENTION

[0002] The invention relates to the identification of nucleic acid and protein expression profiles and nucleic acids, products, and antibodies thereto that are involved in prostate cancer; and to the use of such expression profiles and compositions in the diagnosis, prognosis and therapy of prostate cancer. The invention further relates to methods for identifying and using agents and/or targets that inhibit prostate cancer.

### BACKGROUND OF THE INVENTION

[0003] Prostate cancer is the most commonly diagnosed internal malignancy and second most common cause of cancer death in men in the U.S., resulting in approximately 40,000 deaths each year (Landis et al., CA Cancer J. Clin. 48:6-29 (1998); Greenlee et al., CA Cancer J. Clin. 50(1):7-13 (2000)), and incidence of prostate cancer has been increasing rapidly over the past 20 years in many parts of the world (Nakata et al., Int. J. Urol. 7(7):254-257 (2000); Majeed et al., BJU Int. 85(9):1058-1062 (2000)). It develops as the result of a pathologic transformation of normal prostate cells. In tumorigenesis, the cancer cell undergoes initiation, proliferation and loss of contact inhibition, culminating in invasion of surrounding tissue and, ultimately, metastasis.

[0004] Deaths from prostate cancer are a result of metastasis of a prostate tumor. Therefore, early detection of the development of prostate cancer is critical in reducing mortality from this disease. Measuring levels of prostate-specific antigen (PSA) has become a very common method for early detection and screening, and may have contributed to the slight decrease in the mortality rate from prostate cancer in recent years (Nowroozi et al., Cancer Control 5(6):522-531 (1998)). However, many cases are not diagnosed until the disease has progressed to an advanced stage.

[0005] Treatments such as surgery (prostatectomy), radiation therapy, and cryotherapy are potentially curative when the cancer remains localized to the prostate. Therefore, early detection of prostate cancer is important for a positive prognosis for treatment. Systemic treatment for metastatic prostate cancer is limited to hormone therapy and chemotherapy. Chemical or surgical castration has been the primary treatment for symptomatic metastatic prostate cancer for over 50 years. This testicular androgen deprivation therapy usually results in stabilization or regression of the disease (in 80% of patients), but progression of metastatic prostate cancer eventually develops (Panvichian et al., Cancer Control 3(6):493-500 (1996)). Metastatic disease is currently considered incurable, and the primary goals of treatment are to prolong survival and improve quality of life (Rago, Cancer Control 5(6):513-521 (1998)).

[0006] Thus, methods that can be used for diagnosis and prognosis of prostate cancer and effective treatment of prostate cancer, and including particularly metastatic prostate cancer, would be desirable. Accordingly, provided herein are methods that can be used in diagnosis and prognosis of prostate cancer. Further provided are methods that can be used to screen candidate bioactive agents for the ability to modulate, e.g., treat, prostate cancer. Additionally, provided herein are molecular targets and compositions for therapeutic intervention in prostate cancer and other cancers.

### SUMMARY OF THE INVENTION

[0007] The present invention therefore provides nucleotide sequences of genes that are up- and down-regulated in prostate cancer cells. Such genes are useful for diagnostic purposes, and also as targets for screening for therapeutic compounds that modulate prostate cancer, such as hormones or antibodies. Other aspects of the invention will become apparent to the skilled artisan by the following description of the invention.

[0008] In one aspect, the present invention provides a method of detecting a prostate cancer-associated transcript in a cell from a patient, the method comprising contacting a biological sample from the patient with a polynucleotide that selectively hybridizes to a sequence at least 80% identical to a sequence as shown in Tables 1-16.

[0009] In one embodiment, the present invention provides a method of determining the level of a prostate cancer associated transcript in a cell from a patient.

[0010] In one embodiment, the present invention provides a method of detecting a prostate cancer-associated transcript in a cell from a patient, the method comprising contacting a biological sample from the patient with a polynucleotide that selectively hybridizes to a sequence at least 80% identical to a sequence as shown in Tables 1-16.

[0011] In one embodiment, the polynucleotide selectively hybridizes to a sequence at least 95% identical to a sequence as shown in Tables 1-16. In another embodiment, the polynucleotide comprises a sequence as shown in Tables 1-16.

[0012] In one embodiment, the biological sample is a tissue sample. In another embodiment, the biological sample comprises isolated nucleic acids, e.g., mRNA.

[0013] In one embodiment, the polynucleotide is labeled, e.g., with a fluorescent label.

[0014] In one embodiment, the polynucleotide is immobilized on a solid surface.

[0015] In one embodiment, the patient is undergoing a therapeutic regimen to treat prostate cancer. In another embodiment, the patient is suspected of having metastatic prostate cancer.

[0016] In one embodiment, the patient is a human.

[0017] In one embodiment, the patient is suspected of having a taxol-resistant cancer.

[0018] In one embodiment, the prostate cancer associated transcript is mRNA.

[0019] In one embodiment, the method further comprises the step of amplifying nucleic acids before the step of contacting the biological sample with the polynucleotide.

[0020] In another aspect, the present invention provides a method of monitoring the efficacy of a therapeutic treatment of prostate cancer, the method comprising the steps of (i) providing a biological sample from a patient undergoing the therapeutic treatment; and (ii) determining the level of a prostate cancer-associated transcript in the biological sample by contacting the biological sample with a polynucleotide that selectively hybridizes to a sequence at least 80% identical to a sequence as shown in Tables 1-16, thereby monitoring the efficacy of the therapy. In a further embodiment, the patient has metastatic prostate cancer. In a further embodiment, the patient has a drug resistant (e.g., taxol resistant) form of prostate cancer.

[0021] In one embodiment, the method further comprises the step of: (iii) comparing the level of the prostate cancer-associated transcript to a level of the prostate cancer-associated transcript in a biological sample from the patient prior to, or earlier in, the therapeutic treatment.

[0022] Additionally, provided herein is a method of evaluating the effect of a candidate prostate cancer drug comprising administering the drug to a patient and removing a cell sample from the patient. The expression profile of the cell is then determined. This method may further comprise comparing the expression profile to an expression profile of a healthy individual. In a preferred embodiment, said expression profile includes a gene of Tables 1-16.

[0023] In one aspect, the present invention provides an isolated nucleic acid molecule consisting of a polynucleotide sequence as shown in Tables 1-16.

[0024] In one embodiment, an expression vector or cell comprises the isolated nucleic acid.

[0025] In one aspect, the present invention provides an isolated polypeptide which is encoded by a nucleic acid molecule having polynucleotide sequence as shown in Tables 1-16.

[0026] In another aspect, the present invention provides an antibody that specifically binds to an isolated polypeptide which is encoded by a nucleic acid molecule having polynucleotide sequence as shown in Tables 1-16.

[0027] In one embodiment, the antibody is conjugated to an effector component, e.g., a fluorescent label, a radioisotope or a cytotoxic chemical.

[0028] In one embodiment, the antibody is an antibody fragment. In another embodiment, the antibody is humanized.

[0029] In one aspect, the present invention provides a method of detecting a prostate cancer cell in a biological sample from a patient, the method comprising contacting the biological sample with an antibody as described herein.

[0030] In another aspect, the present invention provides a method of detecting antibodies specific to prostate cancer in a patient, the method comprising contacting a biological sample from the patient with a polypeptide encoded by a nucleic acid comprising a sequence from Tables 1-16.

[0031] In another aspect, the present invention provides a method for identifying a compound that modulates a prostate cancer-associated polypeptide, the method comprising the steps of: (i) contacting the compound with a prostate cancer-associated polypeptide, the polypeptide encoded by a polynucleotide that selectively hybridizes to a sequence at least 80% identical to a sequence as shown in Tables 1-16; and (ii) determining the functional effect of the compound upon the polypeptide.

[0032] In one embodiment, the functional effect is a physical effect, an enzymatic effect, or a chemical effect.

[0033] In one embodiment, the polypeptide is expressed in a eukaryotic host cell or cell membrane. In another embodiment, the polypeptide is recombinant.

[0034] In one embodiment, the functional effect is determined by measuring ligand binding to the polypeptide.

[0035] In another aspect, the present invention provides a method of inhibiting proliferation of a prostate cancer-associated cell to treat prostate cancer in a patient, the method comprising the step of administering to the subject a therapeutically effective amount of a compound identified as described herein.

[0036] In one embodiment, the compound is an antibody.

[0037] In another aspect, the present invention provides a drug screening assay comprising the steps of: (i) administering a test compound to a mammal having prostate cancer or to a cell sample isolated therefrom; (ii) comparing the level of gene expression of a polynucleotide that selectively hybridizes to a sequence at least 80% identical to a sequence as shown in Tables 1-16 in a treated cell or mammal with the level of gene expression of the polynucleotide in a control cell sample or mammal, wherein a test compound that modulates the level of expression of the polynucleotide is a candidate for the treatment of prostate cancer.

[0038] In one embodiment, the control is a mammal with prostate cancer or a cell sample therefrom that has not been treated with the test compound. In another embodiment, the control is a normal cell or mammal.

[0039] In one embodiment, the test compound is administered in varying amounts or concentrations. In another embodiment, the test compound is administered for varying time periods. In another embodiment, the comparison can occur after addition or removal of the drug candidate.

[0040] In one embodiment, the levels of a plurality of polynucleotides that selectively hybridize to a sequence at least 80% identical to a sequence as shown in Tables 1-16 are individually compared to their respective levels in a control cell sample or mammal. In a preferred embodiment the plurality of polynucleotides is from three to ten.

[0041] In another aspect, the present invention provides a method for treating a mammal having prostate cancer comprising administering a compound identified by the assay described herein.

[0042] In another aspect, the present invention provides a pharmaceutical composition for treating a mammal having prostate cancer, the composition comprising a compound identified by the assay described herein and a physiologically acceptable excipient.

[0043] In one aspect, the present invention provides a method of screening drug candidates by providing a cell expressing a gene that is up- and down-regulated as in a prostate cancer. In one embodiment, a gene is selected from Tables 1-16. The method further includes adding a drug candidate to the cell and determining the effect of the drug candidate on the expression of the expression profile gene.

[0044] In one embodiment, the method of screening drug candidates includes comparing the level of expression in the absence of the drug candidate to the level of expression in the presence of the drug candidate, wherein the concentration of the drug candidate can vary when present, and wherein the comparison can occur after addition or removal of the drug candidate. In a preferred embodiment, the cell expresses at least two expression profile genes. The profile genes may show an increase or decrease.

[0045] Also provided is a method of evaluating the effect of a candidate prostate cancer drug comprising administering the drug to a transgenic animal expressing or over-expressing the prostate cancer modulatory protein, or an animal lacking the prostate cancer modulatory protein, for example as a result of a gene knockout.

[0046] Moreover, provided herein is a biochip comprising one or more nucleic acid segments of Tables 1-16, wherein the biochip comprises fewer than 1000 nucleic acid probes. Preferably, at least two nucleic acid segments are included. More preferably, at least three nucleic acid segments are included.

[0047] Furthermore, a method of diagnosing a disorder associated with prostate cancer is provided. The method comprises determining the expression of a gene of Tables 1-16, in a first tissue type of a first individual, and comparing the distribution to the expression of the gene from a second normal tissue type from the first individual or a second unaffected individual. A difference in the expression indicates that the first individual has a disorder associated with prostate cancer.

[0048] In a further embodiment, the biochip also includes a polynucleotide sequence of a gene that is not up- and down-regulated in prostate cancer.

[0049] In one embodiment a method for screening for a bioactive agent capable of interfering with the binding of a prostate cancer modulating protein (prostate cancer modulatory protein) or a fragment thereof and an antibody which binds to said prostate cancer modulatory protein or fragment thereof. In a preferred embodiment, the method comprises combining a prostate cancer modulatory protein or fragment thereof, a candidate bioactive agent and an antibody which binds to said prostate cancer modulatory protein or fragment thereof. The method further includes determining the binding of said prostate cancer modulatory protein or fragment thereof and said antibody. Wherein there is a change in binding, an agent is identified as an interfering agent. The interfering agent can be an agonist or an antagonist. Preferably, the agent inhibits prostate cancer.

[0050] Also provided herein are methods of eliciting an immune response in an individual. In one embodiment a method provided herein comprises administering to an individual a composition comprising a prostate cancer modulating protein, or a fragment thereof. In another embodiment, the protein is encoded by a nucleic acid selected from those of Tables 1-16.

[0051] Further provided herein are compositions capable of eliciting an immune response in an individual. In one embodiment, a composition provided herein comprises a prostate cancer modulating protein, preferably encoded by a nucleic acid of Tables 1-16, or a fragment thereof, and a pharmaceutically acceptable carrier. In another embodiment, said composition comprises a nucleic acid comprising a sequence encoding a prostate cancer modulating protein, preferably selected from the nucleic acids of Tables 1-16, and a pharmaceutically acceptable carrier.

[0052] Also provided are methods of neutralizing the effect of a prostate cancer protein, or a fragment thereof, comprising contacting an agent specific for said protein with said protein in an amount sufficient to effect neutralization. In another embodiment, the protein is encoded by a nucleic acid selected from those of Tables 1-16.

[0053] In another aspect of the invention, a method of treating an individual for prostate cancer is provided. In one embodiment, the method comprises administering to said individual an inhibitor of a prostate cancer modulating protein. In another embodiment, the method comprises administering to a patient having prostate cancer an antibody to a prostate cancer modulating protein conjugated to a therapeutic moiety. Such a therapeutic moiety can be a cytotoxic agent or a radioisotope.

### DETAILED DESCRIPTION OF THE INVENTION

[0054] In accordance with the objects outlined above, the present invention provides novel methods for diagnosis and prognosis evaluation for prostate cancer (PC), including metastatic prostate cancer, as well as methods for screening for compositions which modulate prostate cancer. Also provided are methods for treating prostate cancer.

[0055] In addition to the other nucleic acid and peptide sequences, the present invention also relates to the identification of PAA2 as a gene that is highly over expressed in prostate cancer patient tissues. PAA2 sequence is identical to the zinc transporter ZNT4. Results presented herein demonstrate that PAA2/ZNT4 is highly expressed in prostate cancer cells. The prostate gland is unique in that it has the highest capacity of any organ in the body to accumulate zinc. Zinc uptake is regulated by prolactin and testosterone, which induce the expression of a member of the ZIP family of zinc transporters (Costello et al., 1999, J. Biol. Chem. 274:17499-17504). Zinc accumulation in the prostate functions to inhibit citrate oxidation, which results in a decrease in cellular ATP production (Costello and Franklin, 1998, Prostate 35:285-296). Cancer cells are more sensitive to decreased ATP production and have evolved to prevent zinc accumulation. Without wishing to be bound by theory, the up-regulation of ZNT4 in prostate cancer cells may result in protection of the cells from high zinc levels by its ability to pump accumulated zinc out of the cells.

[0056] The present invention also relates to nucleic acid sequences encoding PBH1. PBH1 is related to human TRPC7 (transient receptor potential-related channels, NP_{—}003298), a putative calcium channel highly expressed in brain (Nagamine et al., Genomics 54:124-131 (1998)). Trp is related to melastatin, a gene down-regulated in metastatic melanomas (Duncan et al., Cancer Res. 58:1515-1520 (1998)), and MTR1, a gene localized to within the Beckwith-Wiedemann syndrome/Wilm's tumor susceptibility region (Prawitt et al., Hum. Mol. Genet. 9:203-216 (2000)). Without wishing to be bound by theory, it is believed that PBH1 functions as a calcium channel.

[0057] As a calcium channel, PBH1 is an ideal target for a small molecule therapeutic, or a therapeutic antibody that disrupts channel function. CD20, the target of Rituximab in non-Hodgekin's lymphoma (Maloney et al., Blood 90:2188-2195 (1997); Leget and Czuczman, Curr. Opin. Oncol. 10:548-551 (1998)), is a plasma membrane calcium channel expressed in B cells (Tedder and Engel, Immunol. Today 15:450-454 (1994)). Similarly, a small molecule, or antibody that inhibits or alters a calcium signal mediated by PBH1, will result in the death of prostate cancer cells.

[0058] PBH1, and other genes of the invention, are also be useful as targets for cytotoxic T-lymphocytes. Genes that are tumor specific, or that are expressed in immune-privileged organs, are currently being used as potential vaccine targets (Van den Eynde and Boon, Int. J. Clin. Lab. Res. 27:81-86 (1997)). The expression pattern of PBH1 indicates that it is an ideal target for cytotoxic T-lymphocytes. Thus, therapies that utilize PBH1-specific cytotoxic T-lymphocytes to induce prostate cancer cell death are also provided by this invention. See, e.g., U.S. Pat. No. 6,051,227 and WO 00/32231, the disclosures of which are herein incorporated by reference.

[0059] The present invention is also related to the identification of PAA3 as a gene that is important in the modulation of prostate cancer and or breast cancer.

[0060] Tables 1-16 provide unigene cluster identification numbers, exemplar accession numbers, or genomic nucleotide position numbers for the nucleotide sequence of genes that exhibit increased or decreased expression in prostate cancer samples.

### DEFINITIONS

[0061] The term “prostate cancer protein” or “prostate cancer polynucleotide” or “prostate cancer-associated transcript” refers to nucleic acid and polypeptide polymorphic variants, alleles, mutants, and interspecies homologues that: (1) have a nucleotide sequence that has greater than about 60% nucleotide sequence identity, 65%, 70%, 75%, 80%, 85%, 90%, preferably 91%, 92%, 93%, 94%, 95%, 96%, 97%, 98% or 99% or greater nucleotide sequence identity, preferably over a region of over a region of at least about 25, 50, 100, 200, 500, 1000, or more nucleotides, to a nucleotide sequence of or associated with a unigene cluster of Tables 1-16; (2) bind to antibodies, e.g., polyclonal antibodies, raised against an immunogen comprising an amino acid sequence encoded by a nucleotide sequence of or associated with a unigene cluster of Tables 1-16, and conservatively modified variants thereof; (3) specifically hybridize under stringent hybridization conditions to a nucleic acid sequence, or the complement thereof of Tables 1-16 and conservatively modified variants thereof or (4) have an amino acid sequence that has greater than about 60% amino acid sequence identity, 65%, 70%, 75%, 80%, 85%, 90%, preferably 91%, 92%, 93%, 94%, 95%, 96%, 97%, 98% or 99% or greater amino sequence identity, preferably over a region of over a region of at least about 25, 50, 100, 200, 500, 1000, or more amino acid, to an amino acid sequence encoded by a nucleotide sequence of or associated with a unigene cluster of Tables 1-16. A polynucleotide or polypeptide sequence is typically from a mammal including, but not limited to, primate, e.g., human; rodent, e.g., rat, mouse, hamster; cow, pig, horse, sheep, or other mammal. A “prostate cancer polypeptide” and a “prostate cancer polynucleotide,” include both naturally occurring or recombinant forms.

[0062] A “full length” prostate cancer protein or nucleic acid refers to a prostate cancer polypeptide or polynucleotide sequence, or a variant thereof, that contains all of the elements normally contained in one or more naturally occurring, wild type prostate cancer polynucleotide or polypeptide sequences. For example, a full length prostate cancer nucleic acid will typically comprise all of the exons that encode for the full length, naturally occurring protein. The “full length” may be prior to, or after, various stages of post-translation processing or splicing, including alternative splicing.

[0063] “Biological sample” as used herein is a sample of biological tissue or fluid that contains nucleic acids or polypeptides, e.g., of a prostate cancer protein, polynucleotide or transcript. Such samples include, but are not limited to, tissue isolated from primates, e.g., humans, or rodents, e.g., mice, and rats. Biological samples may also include sections of tissues such as biopsy and autopsy samples, frozen sections taken for histologic purposes, blood, plasma, serum, sputum, stool, tears, mucus, hair, skin, etc. Biological samples also include explants and primary and/or transformed cell cultures derived from patient tissues. A biological sample is typically obtained from a eukaryotic organism, most preferably a mammal such as a primate e.g., chimpanzee or human; cow; dog; cat; a rodent, e.g., guinea pig, rat, mouse; rabbit; or a bird; reptile; or fish.

[0064] “Providing a biological sample” means to obtain a biological sample for use in methods described in this invention. Most often, this will be done by removing a sample of cells from an animal, but can also be accomplished by using previously isolated cells (e.g., isolated by another person, at another time, and/or for another purpose), or by performing the methods of the invention in vivo. Archival tissues, having treatment or outcome history, will be particularly useful.

[0065] The terms “identical” or percent “identity,” in the context of two or more nucleic acids or polypeptide sequences, refer to two or more sequences or subsequences that are the same or have a specified percentage of amino acid residues or nucleotides that are the same (i.e., about 60% identity, preferably 70%, 75%, 80%, 85%, 90%, 91%, 92%, 93%, 94%, 95%, 96%, 97%, 98%, 99%, or higher identity over a specified region, when compared and aligned for maximum correspondence over a comparison window or designated region) as measured using a BLAST or BLAST 2.0 sequence comparison algorithms with default parameters described below, or by manual alignment and visual inspection (see, e.g., NCBI web site http://www.ncbi.nlm.nih.gov/BLAST/ or the like). Such sequences are then said to be “substantially identical.” This definition also refers to, or may be applied to, the compliment of a test sequence. The definition also includes sequences that have deletions and/or additions, as well as those that have substitutions, as well as naturally occurring, e.g., polymorphic or allelic variants, and man-made variants. As described below, the preferred algorithms can account for gaps and the like. Preferably, identity exists over a region that is at least about 25 amino acids or nucleotides in length, or more preferably over a region that is 50-100 amino acids or nucleotides in length.

[0066] For sequence comparison, typically one sequence acts as a reference sequence, to which test sequences are compared. When using a sequence comparison algorithm, test and reference sequences are entered into a computer, subsequence coordinates are designated, if necessary, and sequence algorithm program parameters are designated. Preferably, default program parameters can be used, or alternative parameters can be designated. The sequence comparison algorithm then calculates the percent sequence identities for the test sequences relative to the reference sequence, based on the program parameters.

[0067] A “comparison window”, as used herein, includes reference to a segment of one of the number of contiguous positions selected from the group consisting typically of from 20 to 600, usually about 50 to about 200, more usually about 100 to about 150 in which a sequence may be compared to a reference sequence of the same number of contiguous positions after the two sequences are optimally aligned. Methods of alignment of sequences for comparison are well-known in the art. Optimal alignment of sequences for comparison can be conducted, e.g., by the local homology algorithm of Smith & Waterman, Adv. Appl. Math. 2:482 (1981), by the homology alignment algorithm of Needleman & Wunsch, J. Mol. Biol. 48:443 (1970), by the search for similarity method of Pearson & Lipman, Proc. Nat'l. Acad. Sci. USA 85:2444 (1988), by computerized implementations of these algorithms (GAP, BESTFIT, FASTA, and TFASTA in the Wisconsin Genetics Software Package, Genetics Computer Group, 575 Science Dr., Madison, Wis.), or by manual alignment and visual inspection (see, e.g., Current Protocols in Molecular Biology (Ausubel et al., eds. 1995 supplement)).

[0068] Preferred examples of algorithms that are suitable for determining percent sequence identity and sequence similarity include the BLAST and BLAST 2.0 algorithms, which are described in Altschul et al., Nuc. Acids Res. 25:3389-3402 (1977) and Altschul et al., J. Mol. Biol. 215:403-410 (1990). BLAST and BLAST 2.0 are used, with the parameters described herein, to determine percent sequence identity for the nucleic acids and proteins of the invention. Software for performing BLAST analyses is publicly available through the National Center for Biotechnology Information (http://www.ncbi.nlm.nih.gov/). This algorithm involves first identifying high scoring sequence pairs (HSPs) by identifying short words of length W in the query sequence, which either match or satisfy some positive-valued threshold score T when aligned with a word of the same length in a database sequence. T is referred to as the neighborhood word score threshold (Altschul et al., supra). These initial neighborhood word hits act as seeds for initiating searches to find longer HSPs containing them. The word hits are extended in both directions along each sequence for as far as the cumulative alignment score can be increased. Cumulative scores are calculated using, e.g., for nucleotide sequences, the parameters M (reward score for a pair of matching residues; always >0) and N (penalty score for mismatching residues; always <0). For amino acid sequences, a scoring matrix is used to calculate the cumulative score. Extension of the word hits in each direction are halted when: the cumulative alignment score falls off by the quantity X from its maximum achieved value; the cumulative score goes to zero or below, due to the accumulation of one or more negative-scoring residue alignments; or the end of either sequence is reached. The BLAST algorithm parameters W, T, and X determine the sensitivity and speed of the alignment. The BLASTN program (for nucleotide sequences) uses as defaults a wordlength (W) of 11, an expectation (E) of 10, M=5, N=−4 and a comparison of both strands. For amino acid sequences, the BLASTP program uses as defaults a wordlength of 3, and expectation (E) of 10, and the BLOSUM62 scoring matrix (see Henikoff & Henikoff, Proc. Natl. Acad. Sci. USA 89:10915 (1989)) alignments (B) of 50, expectation (E) of 10, M=5, N=−4, and a comparison of both strands.

[0069] The BLAST algorithm also performs a statistical analysis of the similarity between two sequences (see, e.g., Karlin & Altschul, Proc. Nat'l. Acad. Sci. USA 90:5873-5787 (1993)). One measure of similarity provided by the BLAST algorithm is the smallest sum probability (P(N)), which provides an indication of the probability by which a match between two nucleotide or amino acid sequences would occur by chance. For example, a nucleic acid is considered similar to a reference sequence if the smallest sum probability in a comparison of the test nucleic acid to the reference nucleic acid is less than about 0.2, more preferably less than about 0.01, and most preferably less than about 0.001. Log values may be large negative numbers, e.g., 5, 10, 20, 30, 40, 40, 70, 90, 110, 150, 170, etc.

[0070] An indication that two nucleic acid sequences or polypeptides are substantially identical is that the polypeptide encoded by the first nucleic acid is immunologically cross reactive with the antibodies raised against the polypeptide encoded by the second nucleic acid, as described below. Thus, a polypeptide is typically substantially identical to a second polypeptide, e.g., where the two peptides differ only by conservative substitutions. Another indication that two nucleic acid sequences are substantially identical is that the two molecules or their complements hybridize to each other under stringent conditions, as described below. Yet another indication that two nucleic acid sequences are substantially identical is that the same primers can be used to amplify the sequences.

[0071] A “host cell” is a naturally occurring cell or a transformed cell that contains an expression vector and supports the replication or expression of the expression vector. Host cells may be cultured cells, explants, cells in vivo, and the like. Host cells may be prokaryotic cells such as E. coli, or eukaryotic cells such as yeast, insect, amphibian, or mammalian cells such as CHO, HeLa, and the like (see, e.g., the American Type Culture Collection catalog or web site, www.atcc.org).

[0072] The terms “isolated,” “purified,” or “biologically pure” refer to material that is substantially or essentially free from components that normally accompany it as found in its native state. Purity and homogeneity are typically determined using analytical chemistry techniques such as polyacrylamide gel electrophoresis or high performance liquid chromatography. A protein or nucleic acid that is the predominant species present in a preparation is substantially purified. In particular, an isolated nucleic acid is separated from some open reading frames that naturally flank the gene and encode proteins other than protein encoded by the gene. The term “purified” in some embodiments denotes that a nucleic acid or protein gives rise to essentially one band in an electrophoretic gel. Preferably, it means that the nucleic acid or protein is at least 85% pure, more preferably at least 95% pure, and most preferably at least 99% pure. “Purify” or “purification” in other embodiments means removing at least one contaminant from the composition to be purified. In this sense, purification does not require that the purified compound be homogenous, e.g., 100% pure.

[0073] The terms “polypeptide,” “peptide” and “protein” are used interchangeably herein to refer to a polymer of amino acid residues. The terms apply to amino acid polymers in which one or more amino acid residue is an artificial chemical mimetic of a corresponding naturally occurring amino acid, as well as to naturally occurring amino acid polymers, those containing modified residues, and non-naturally occurring amino acid polymer.

[0074] The term “amino acid” refers to naturally occurring and synthetic amino acids, as well as amino acid analogs and amino acid mimetics that function similarly to the naturally occurring amino acids. Naturally occurring amino acids are those encoded by the genetic code, as well as those amino acids that are later modified, e.g., hydroxyproline, γ-carboxyglutamate, and O-phosphoserine. Amino acid analogs refers to compounds that have the same basic chemical structure as a naturally occurring amino acid, e.g., an α carbon that is bound to a hydrogen, a carboxyl group, an amino group, and an R group, e.g., homoserine, norleucine, methionine sulfoxide, methionine methyl sulfonium. Such analogs may have modified R groups (e.g., norleucine) or modified peptide backbones, but retain the same basic chemical structure as a naturally occurring amino acid. Amino acid mimetics refers to chemical compounds that have a structure that is different from the general chemical structure of an amino acid, but that functions similarly to a naturally occurring amino acid.

[0075] Amino acids may be referred to herein by either their commonly known three letter symbols or by the one-letter symbols recommended by the IUPAC-IUB Biochemical Nomenclature Commission. Nucleotides, likewise, may be referred to by their commonly accepted single-letter codes.

[0076] “Conservatively modified variants” applies to both amino acid and nucleic acid sequences. With respect to particular nucleic acid sequences, conservatively modified variants refers to those nucleic acids which encode identical or essentially identical amino acid sequences, or where the nucleic acid does not encode an amino acid sequence, to essentially identical or associated, e.g., naturally contiguous, sequences. Because of the degeneracy of the genetic code, a large number of functionally identical nucleic acids encode most proteins. For instance, the codons GCA, GCC, GCG and GCU all encode the amino acid alanine. Thus, at every position where an alanine is specified by a codon, the codon can be altered to another of the corresponding codons described without altering the encoded polypeptide. Such nucleic acid variations are “silent variations,” which are one species of conservatively modified variations. Every nucleic acid sequence herein which encodes a polypeptide also describes silent variations of the nucleic acid. One of skill will recognize that in certain contexts each codon in a nucleic acid (except AUG, which is ordinarily the only codon for methionine, and TGG, which is ordinarily the only codon for tryptophan) can be modified to yield a functionally identical molecule. Accordingly, often silent variations of a nucleic acid which encodes a polypeptide is implicit in a described sequence with respect to the expression product, but not with respect to actual probe sequences.

[0077] As to amino acid sequences, one of skill will recognize that individual substitutions, deletions or additions to a nucleic acid, peptide, polypeptide, or protein sequence which alters, adds or deletes a single amino acid or a small percentage of amino acids in the encoded sequence is a “conservatively modified variant” where the alteration results in the substitution of an amino acid with a chemically similar amino acid. Conservative substitution tables providing functionally similar amino acids are well known in the art. Such conservatively modified variants are in addition to and do not exclude polymorphic variants, interspecies homologs, and alleles of the invention typically conservative substitutions for one another: 1) Alanine (A), Glycine (G); 2) Aspartic acid (D), Glutamic acid (E); 3) Asparagine (N), Glutamine (Q); 4) Arginine (R), Lysine (K); 5) Isoleucine (I), Leucine (L), Methionine (M), Valine (V); 6) Phenylalanine (F), Tyrosine (Y), Tryptophan (W); 7) Serine (S), Threonine (T); and 8) Cysteine (C), Methionine (M) (see, e.g., Creighton, Proteins (1984)).

[0078] Macromolecular structures such as polypeptide structures can be described in terms of various levels of organization. For a general discussion of this organization, see, e.g., Alberts et al., Molecular Biology of the Cell (3^{rd} ed., 1994) and Cantor & Schimmel, Biophysical Chemistry Part I: The Conformation of Biological Macromolecules (1980). “Primary structure” refers to the amino acid sequence of a particular peptide. “Secondary structure” refers to locally ordered, three dimensional structures within a polypeptide. These structures are commonly known as domains. Domains are portions of a polypeptide that often form a compact unit of the polypeptide and are typically 25 to approximately 500 amino acids long. Typical domains are made up of sections of lesser organization such as stretches of β-sheet and α-helices. “Tertiary structure” refers to the complete three dimensional structure of a polypeptide monomer. “Quaternary structure” refers to the three dimensional structure formed, usually by the noncovalent association of independent tertiary units. Anisotropic terms are also known as energy terms.

[0079] “Nucleic acid” or “oligonucleotide” or “polynucleotide” or grammatical equivalents used herein means at least two nucleotides covalently linked together. Oligonucleotides are typically from about 5, 6, 7, 8, 9, 10, 12, 15, 25, 30, 40, 50 or more nucleotides in length, up to about 100 nucleotides in length. Nucleic acids and polynucleotides are a polymers of any length, including longer lengths, e.g., 200, 300, 500, 1000, 2000, 3000, 5000, 7000, 10,000, etc. A nucleic acid of the present invention will generally contain phosphodiester bonds, although in some cases, nucleic acid analogs are included that may have alternate backbones, comprising, e.g., phosphoramidate, phosphorothioate, phosphorodithioate, or O-methylphosphoroamidite linkages (see Eckstein, Oligonucleotides and Analogues: A Practical Approach, Oxford University Press); and peptide nucleic acid backbones and linkages. Other analog nucleic acids include those with positive backbones; non-ionic backbones, and non-ribose backbones, including those described in U.S. Pat. Nos. 5,235,033 and 5,034,506, and Chapters 6 and 7, ASC Symposium Series 580, Carbohydrate Modifications in Antisense Research, Sanghui & Cook, eds. Nucleic acids containing one or more carbocyclic sugars are also included within one definition of nucleic acids. Modifications of the ribose-phosphate backbone may be done for a variety of reasons, e.g. to increase the stability and half-life of such molecules in physiological environments or as probes on a biochip. Mixtures of naturally occurring nucleic acids and analogs can be made; alternatively, mixtures of different nucleic acid analogs, and mixtures of naturally occurring nucleic acids and analogs may be made.

[0080] A variety of references disclose such nucleic acid analogs, including, for example, phosphoramidate (Beaucage et al., Tetrahedron 49(10):1925 (1993) and references therein; Letsinger, J. Org. Chem. 35:3800 (1970); Sprinzl et al., Eur. J. Biochem. 81:579 (1977); Letsinger et al., Nucl. Acids Res. 14:3487 (1986); Sawai et al, Chem. Lett. 805 (1984), Letsinger et al., J. Am. Chem. Soc. 110:4470 (1988); and Pauwels et al., Chemica Scripta 26:141 91986)), phosphorothioate (Mag et al., Nucleic Acids Res. 19:1437 (1991); and U.S. Pat. No. 5,644,048), phosphorodithioate (Briu et al., J. Am. Chem. Soc. 111:2321 (1989), O-methylphosphoroamidite linkages (see Eckstein, Oligonucleotides and Analogues: A Practical Approach, Oxford University Press), and peptide nucleic acid backbones and linkages (see Egholm, J. Am. Chem. Soc. 114:1895 (1992); Meier et al., Chem. Int. Ed. Engl. 31:1008 (1992); Nielsen, Nature, 365:566 (1993); Carlsson et al., Nature 380:207 (1996), all of which are incorporated by reference). Other analog nucleic acids include those with positive backbones (Denpcy et al., Proc. Natl. Acad. Sci. USA 92:6097 (1995); non-ionic backbones (U.S. Pat. Nos. 5,386,023, 5,637,684, 5,602,240, 5,216,141 and 4,469,863; Kiedrowshi et al., Angew. Chem. Intl. Ed. English 30:423 (1991); Letsinger et al., J. Am. Chem. Soc. 110:4470 (1988); Letsinger et al., Nucleoside & Nucleotide 13:1597 (1994); Chapters 2 and 3, ASC Symposium Series 580, “Carbohydrate Modifications in Antisense Research”, Ed. Y. S. Sanghui and P. Dan Cook; Mesmaeker et al., Bioorganic & Medicinal Chem. Lett. 4:395 (1994); Jeffs et al., J. Biomolecular NMR 34:17 (1994); Tetrahedron Lett. 37:743 (1996)) and non-ribose backbones, including those described in U.S. Pat. Nos. 5,235,033 and 5,034,506, and Chapters 6 and 7, ASC Symposium Series 580, “Carbohydrate Modifications in Antisense Research”, Ed. Y. S. Sanghui and P. Dan Cook. Nucleic acids containing one or more carbocyclic sugars are also included within one definition of nucleic acids (see Jenkins et al., Chem. Soc. Rev. (1995) pp 169-176). Several nucleic acid analogs are described in Rawls, C & E News Jun. 2, 1997 page 35. All of these references are hereby expressly incorporated by reference.

[0081] Particularly preferred are peptide nucleic acids (PNA) which includes peptide nucleic acid analogs. These backbones are substantially non-ionic under neutral conditions, in contrast to the highly charged phosphodiester backbone of naturally occurring nucleic acids. This results in two advantages. First, the PNA backbone exhibits improved hybridization kinetics. PNAs have larger changes in the melting temperature (Tₘ) for mismatched versus perfectly matched basepairs. DNA and RNA typically exhibit a 2-4° C. drop in Tₙ, for an internal mismatch. With the non-ionic PNA backbone, the drop is closer to 7-9° C. Similarly; due to their non-ionic nature, hybridization of the bases attached to these backbones is relatively insensitive to salt concentration. In addition, PNAs are not degraded by cellular enzymes, and thus can be more stable.

[0082] The nucleic acids may be single stranded or double stranded, as specified, or contain portions of both double stranded or single stranded sequence. As will be appreciated by those in the art, the depiction of a single strand also defines the sequence of the complementary strand; thus the sequences described herein also provide the complement of the sequence. The nucleic acid may be DNA, both genomic and cDNA, RNA or a hybrid, where the nucleic acid may contain combinations of deoxyribo- and ribo-nucleotides, and combinations of bases, including uracil, adenine, thymine, cytosine, guanine, inosine, xanthine hypoxanthine, isocytosine, isoguanine, etc. “Transcript” typically refers to a naturally occurring RNA, e.g., a pre-mRNA, hnRNA, or mRNA. As used herein, the term “nucleoside” includes nucleotides and nucleoside and nucleotide analogs, and modified nucleosides such as amino modified nucleosides. In addition, “nucleoside” includes non-naturally occurring analog structures. Thus, e.g. the individual units of a peptide nucleic acid, each containing a base, are referred to herein as a nucleoside.

[0083] A “label” or a “detectable moiety” is a composition detectable by spectroscopic, photochemical, biochemical, immunochemical, chemical, or other physical means. For example, useful labels include fluorescent dyes, electron-dense reagents, enzymes (e.g., as commonly used in an ELISA), biotin, digoxigenin, or haptens and proteins or other entities which can be made detectable, e.g., by incorporating a radiolabel into the peptide or used to detect antibodies specifically reactive with the peptide. The radioisotope may be, for example, 3H, 14C, 32P, 35S, or 125I. In some cases, particularly using antibodies against the proteins of the invention, the radioisotopes are used as toxic moieties, as described below. The labels may be incorporated into the prostate cancer nucleic acids, proteins and antibodies at any position. Any method known in the art for conjugating the antibody to the label may be employed, including those methods described by Hunter et al., Nature, 144:945 (1962); David et al., Biochemistry, 13:1014 (1974); Pain et al., J. Immunol. Meth., 40:219 (1981); and Nygren, J. Histochem. and Cytochem., 30:407 (1982). The lifetime of radiolabeled peptides or radiolabeled antibody compositions may extended by the addition of substances that stablize the radiolabeled peptide or antibody and protect it from degradation. Any substance or combination of substances that stablize the radiolabeled peptide or antibody may be used including those substances disclosed in U.S. Pat. No. 5,961,955.

[0084] An “effector” or “effector moiety” or “effector component” is a molecule that is bound (or linked, or conjugated), either covalently, through a linker or a chemical bond, or noncovalently, through ionic, van der Waals, electrostatic, or hydrogen bonds, to an antibody. The “effector” can be a variety of molecules including, e.g., detection moieties including radioactive compounds, fluorescent compounds, an enzyme or substrate, tags such as epitope tags, a toxin; activatable moieties, a chemotherapeutic agent; a lipase; an antibiotic; or a radioisotope emitting “hard” e.g., beta radiation.

[0085] A “labeled nucleic acid probe or oligonucleotide” is one that is bound, either covalently, through a linker or a chemical bond, or noncovalently, through ionic, van der Waals, electrostatic, or hydrogen bonds to a label such that the presence of the probe may be detected by detecting the presence of the label bound to the probe. Alternatively, method using high affinity interactions may achieve the same results where one of a pair of binding partners binds to the other, e.g., biotin, streptavidin.

[0086] As used herein a “nucleic acid probe or oligonucleotide” is defined as a nucleic acid capable of binding to a target nucleic acid of complementary sequence through one or more types of chemical bonds, usually through complementary base pairing, usually through hydrogen bond formation. As used herein, a probe may include natural (i.e., A, G, C, or T) or modified bases (7-deazaguanosine, inosine, etc.). In addition, the bases in a probe may be joined by a linkage other than a phosphodiester bond, so long as it does not functionally interfere with hybridization. Thus, e.g., probes may be peptide nucleic acids in which the constituent bases are joined by peptide bonds rather than phosphodiester linkages. It will be understood by one of skill in the art that probes may bind target sequences lacking complete complementarity with the probe sequence depending upon the stringency of the hybridization conditions. The probes are preferably directly labeled as with isotopes, chromophores, lumiphores, chromogens, or indirectly labeled such as with biotin to which a streptavidin complex may later bind. By assaying for the presence or absence of the probe, one can detect the presence or absence of the select sequence or subsequence. Diagnosis or prognosis may be based at the genomic level, or at the level of RNA or protein expression.

[0087] The term “recombinant” when used with reference, e.g., to a cell, or nucleic acid, protein, or vector, indicates that the cell, nucleic acid, protein or vector, has been modified by the introduction of a heterologous nucleic acid or protein or the alteration of a native nucleic acid or protein, or that the cell is derived from a cell so modified. Thus, e.g., recombinant cells express genes that are not found within the native (non-recombinant) form of the cell or express native genes that are otherwise abnormally expressed, under expressed or not expressed at all. By the term “recombinant nucleic acid” herein is meant nucleic acid, originally formed in vitro, in general, by the manipulation of nucleic acid, e.g., using polymerases and endonucleases, in a form not normally found in nature. In this manner, operably linkage of different sequences is achieved. Thus an isolated nucleic acid, in a linear form, or an expression vector formed in vitro by ligating DNA molecules that are not normally joined, are both considered recombinant for the purposes of this invention. It is understood that once a recombinant nucleic acid is made and reintroduced into a host cell or organism, it will replicate non-recombinantly, i.e., using the in vivo cellular machinery of the host cell rather than in vitro manipulations; however, such nucleic acids, once produced recombinantly, although subsequently replicated non-recombinantly, are still considered recombinant for the purposes of the invention. Similarly, a “recombinant protein” is a protein made using recombinant techniques, i.e., through the expression of a recombinant nucleic acid as depicted above.

[0088] The term “heterologous” when used with reference to portions of a nucleic acid indicates that the nucleic acid comprises two or more subsequences that are not normally found in the same relationship to each other in nature. For instance, the nucleic acid is typically recombinantly produced, having two or more sequences, e.g., from unrelated genes arranged to make a new functional nucleic acid, e.g., a promoter from one source and a coding region from another source. Similarly, a heterologous protein will often refer to two or more subsequences that are not found in the same relationship to each other in nature (e.g., a fusion protein).

[0089] A “promoter” is defined as an array of nucleic acid control sequences that direct transcription of a nucleic acid. As used herein, a promoter includes necessary nucleic acid sequences near the start site of transcription, such as, in the case of a polymerase II type promoter, a TATA element. A promoter also optionally includes distal enhancer or repressor elements, which can be located as much as several thousand base pairs from the start site of transcription. A “constitutive” promoter is a promoter that is active under most environmental and developmental conditions. An “inducible” promoter is a promoter that is active under environmental or developmental regulation. The term “operably linked” refers to a functional linkage between a nucleic acid expression control sequence (such as a promoter, or array of transcription factor binding sites) and a second nucleic acid sequence, wherein the expression control sequence directs transcription of the nucleic acid corresponding to the second sequence.

[0090] An “expression vector” is a nucleic acid construct, generated recombinantly or synthetically, with a series of specified nucleic acid elements that permit transcription of a particular nucleic acid in a host cell. The expression vector can be part of a plasmid, virus, or nucleic acid fragment. Typically, the expression vector includes a nucleic acid to be transcribed operably linked to a promoter.

[0091] The phrase “selectively (or specifically) hybridizes to” refers to the binding, duplexing, or hybridizing of a molecule only to a particular nucleotide sequence that is determinative of the presence of the nucleotide sequence, in a heterogeneous population of nucleic acids and other biologics (e.g., total cellular or library DNA or RNA). Similarly, the phrase “specifically (or selectively) binds” to an antibody or “specifically (or selectively) immunoreactive with,” when referring to a protein or peptide, refers to a binding reaction that is determinative of the presence of the protein, in a heterogeneous population of proteins and other biologics. Thus, under designated immunoassay or nucleic acid hybridization conditions, the specified antibodies or nucleic acid probes bind to a particular protein nucleotide sequences at least two times the background and more typically more than 10 to 100 times background.

[0092] Specific binding to an antibody under such conditions requires an antibody that is selected for its specificity for a particular protein. For example, polyclonal antibodies raised to a particular protein, polymorphic variants, alleles, orthologs, and conservatively modified variants, or splice variants, or portions thereof, can be selected to obtain only those polyclonal antibodies that are specifically immunoreactive with the desired prostact cancer protein and not with other proteins. This selection may be achieved by subtracting out antibodies that cross-react with other molecules. A variety of immunoassay formats may be used to select antibodies specifically immunoreactive with a particular protein. For example, solid-phase ELISA immunoassays are routinely used to select antibodies specifically immunoreactive with a protein (see, e.g., Harlow & Lane, Antibodies, A Laboratory Manual (1988) for a description of immunoassay formats and conditions that can be used to determine specific immunoreactivity).

[0093] The phrase “stringent hybridization conditions” refers to conditions under which a probe will hybridize to its target subsequence, typically in a complex mixture of nucleic acids, but to no other sequences. Stringent conditions are sequence-dependent and will be different in different circumstances. Longer sequences hybridize specifically at higher temperatures. An extensive guide to the hybridization of nucleic acids is found in Tijssen, Techniques in Biochemistry and Molecular Biology—Hybridization with Nucleic Probes, “Overview of principles of hybridization and the strategy of nucleic acid assays” (1993). Generally, stringent conditions are selected to be about 5-10° C. lower than the thermal melting point (Tₘ) for the specific sequence at a defined ionic strength pH. The Tₘ, is the temperature (under defined ionic strength, pH, and nucleic concentration) at which 50% of the probes complementary to the target hybridize to the target sequence at equilibrium (as the target sequences are present in excess, at Tₘ, 50% of the probes are occupied at equilibrium). Stringent conditions will be those in which the salt concentration is less than about 1.0 M sodium ion, typically about 0.01 to 1.0 M sodium ion concentration (or other salts) at pH 7.0 to 8.3 and the temperature is at least about 30° C. for short probes (e.g., 10 to 50 nucleotides) and at least about 60° C. for long probes (e.g., greater than 50 nucleotides). Stringent conditions may also be achieved with the addition of destabilizing agents such as formamide. For selective or specific hybridization, a positive signal is at least two times background, preferably 10 times background hybridization. Exemplary stringent hybridization conditions can be as following: 50% formamide, 5×SSC, and 1% SDS, incubating at 42° C., or, 5×SSC, 1% SDS, incubating at 65° C., with wash in 0.2×SSC, and 0.1% SDS at 65° C. For PCR, a temperature of about 36° C. is typical for low stringency amplification, although annealing temperatures may vary between about 32° C. and 48° C. depending on primer length. For high stringency PCR amplification, a temperature of about 62° C. is typical, although high stringency annealing temperatures can range from about 50° C. to about 65° C., depending on the primer length and specificity. Typical cycle conditions for both high and low stringency amplifications include a denaturation phase of 90° C.-95° C. for 30 sec-2 min., an annealing phase lasting 30 sec.-2 min., and an extension phase of about 72° C. for 1-2 min. Protocols and guidelines for low and high stringency amplification reactions are provided, e.g., in Innis et al. (1990)PCR Protocols, A Guide to Methods and Applications, Academic Press, Inc. N.Y.).

[0094] Nucleic acids that do not hybridize to each other under stringent conditions are still substantially identical if the polypeptides which they encode are substantially identical. This occurs, e.g., when a copy of a nucleic acid is created using the maximum codon degeneracy permitted by the genetic code. In such cases, the nucleic acids typically hybridize under moderately stringent hybridization conditions. Exemplary “moderately stringent hybridization conditions” include a hybridization in a buffer of 40% formamide, 1 M NaCl, 1% SDS at 37° C., and a wash in 1×SSC at 45° C. A positive hybridization is at least twice background. Those of ordinary skill will readily recognize that alternative hybridization and wash conditions can be utilized to provide conditions of similar stringency. Additional guidelines for determining hybridization parameters are provided in numerous reference, e.g., and Current Protocols in Molecular Biology, ed. Ausubel, et al.

[0095] The phrase “functional effects” in the context of assays for testing compounds that modulate activity of a prostate cancer protein includes the determination of a parameter that is indirectly or directly under the influence of the prostate cancer protein or nucleic acid, e.g., a functional, physical, or chemical effect, such as the ability to decrease prostate cancer. It includes ligand binding activity; cell growth on soft agar; anchorage dependence; contact inhibition and density limitation of growth; cellular proliferation; cellular transformation; growth factor or serum dependence; tumor specific marker levels; invasiveness into Matrigel; tumor growth and metastasis in vivo; mRNA and protein expression in cells undergoing metastasis, and other characteristics of prostate cancer cells. “Functional effects” include in vitro, in vivo, and ex vivo activities.

[0096] By “determining the functional effect” is meant assaying for a compound that increases or decreases a parameter that is indirectly or directly under the influence of a prostate cancer protein sequence, e.g., functional, enzymatic, physical and chemical effects. Such functional effects can be measured by any means known to those skilled in the art, e.g., changes in spectroscopic characteristics (e.g., fluorescence, absorbance, refractive index), hydrodynamic (e.g., shape), chromatographic, or solubility properties for the protein, measuring inducible markers or transcriptional activation of the prostate cancer protein; measuring binding activity or binding assays, e.g. binding to antibodies or other ligands, and measuring cellular proliferation. Determination of the functional effect of a compound on prostate cancer can also be performed using prostate cancer assays known to those of skill in the art such as an in vitro assays, e.g., cell growth on soft agar; anchorage dependence; contact inhibition and density limitation of growth; cellular proliferation; cellular transformation; growth factor or serum dependence; tumor specific marker levels; invasiveness into Matrigel; tumor growth and metastasis in vivo; mRNA and protein expression in cells undergoing metastasis, and other characteristics of prostate cancer cells. The functional effects can be evaluated by many means known to those skilled in the art, e.g., microscopy for quantitative or qualitative measures of alterations in morphological features, measurement of changes in RNA or protein levels for prostate cancer-associated sequences, measurement of RNA stability, identification of downstream or reporter gene expression (CAT, luciferase, β-gal, GFP and the like), e.g., via chemiluminescence, fluorescence, colorimetric reactions, antibody binding, inducible markers, and ligand binding assays.

[0097] “Inhibitors”, “activators”, and “modulators” of prostate cancer polynucleotide and polypeptide sequences are used to refer to activating, inhibitory, or modulating molecules or compounds identified using in vitro and in vivo assays of prostate cancer polynucleotide and polypeptide sequences. Inhibitors are compounds that, e.g., bind to, partially or totally block activity, decrease, prevent, delay activation, inactivate, desensitize, or down regulate the activity or expression of prostate cancer proteins, e.g., antagonists. Antisense nucleic acids may seem to inhibit expression and subsequent function of the protein. “Activators” are compounds that increase, open, activate, facilitate, enhance activation, sensitize, agonize, or up regulate prostate cancer protein activity. Inhibitors, activators, or modulators also include genetically modified versions of prostate cancer proteins, e.g., versions with altered activity, as well as naturally occurring and synthetic ligands, antagonists, agonists, antibodies, small chemical molecules and the like. Such assays for inhibitors and activators include, e.g., expressing the prostate cancer protein in vitro, in cells, or cell membranes, applying putative modulator compounds, and then determining the functional effects on activity, as described above. Activators and inhibitors of prostate cancer can also be identified by incubating prostate cancer cells with the test compound and determining increases or decreases in the expression of 1 or more prostate cancer proteins, e.g., 1, 2, 3, 4, 5, 10, 15, 20, 25, 30, 40, 50 or more prostate cancer proteins, such as prostate cancer proteins encoded by the sequences set out in Tables 1-16.

[0098] Samples or assays comprising prostate cancer proteins that are treated with a potential activator, inhibitor, or modulator are compared to control samples without the inhibitor, activator, or modulator to examine the extent of inhibition. Control samples (untreated with inhibitors) are assigned a relative protein activity value of 100%. Inhibition of a polypeptide is achieved when the activity value relative to the control is about 80%, preferably 50%, more preferably 25-0%. Activation of a prostate cancer polypeptide is achieved when the activity value relative to the control (untreated with activators) is 110%, more preferably 150%, more preferably 200-500% (i.e., two to five fold higher relative to the control), more preferably 1000-3000% higher.

[0099] The phrase “changes in cell growth” refers to any change in cell growth and proliferation characteristics in vitro or in vivo, such as formation of foci, anchorage independence, semi-solid or soft agar growth, changes in contact inhibition and density limitation of growth, loss of growth factor or serum requirements, changes in cell morphology, gaining or losing immortalization, gaining or losing tumor specific markers, ability to form or suppress tumors when injected into suitable animal hosts, and/or immortalization of the cell. See, e.g., Freshney, Culture of Animal Cells a Manual of Basic Technique pp. 231-241 (3^{rd} ed. 1994).

[0100] “Tumor cell” refers to precancerous, cancerous, and normal cells in a tumor.

[0101] “Cancer cells,” “transformed” cells or “transformation” in tissue culture, refers to spontaneous or induced phenotypic changes that do not necessarily involve the uptake of new genetic material. Although transformation can arise from infection with a transforming virus and incorporation of new genomic DNA, or uptake of exogenous DNA, it can also arise spontaneously or following exposure to a carcinogen, thereby mutating an endogenous gene. Transformation is associated with phenotypic changes, such as immortalization of cells, aberrant growth control, nonmorphological changes, and/or malignancy (see, Freshney, Culture of Animal Cells a Manual of Basic Technique (3^{rd} ed. 1994)).

[0102] “Antibody” refers to a polypeptide comprising a framework region from an immunoglobulin gene or fragments thereof that specifically binds and recognizes an antigen. The recognized immunoglobulin genes include the kappa, lambda, alpha, gamma, delta, epsilon, and mu constant region genes, as well as the myriad immunoglobulin variable region genes. Light chains are classified as either kappa or lambda. Heavy chains are classified as gamma, mu, alpha, delta, or epsilon, which in turn define the immunoglobulin classes, IgG, IgM, IgA, IgD and IgE, respectively. Typically, the antigen-binding region of an antibody or its functional equivalent will be most critical in specificity and affinity of binding. See Paul, Fundamental Immunology.

[0103] An exemplary immunoglobulin (antibody) structural unit comprises a tetramer. Each tetramer is composed of two identical pairs of polypeptide chains, each pair having one “light” (about 25 kD) and one “heavy” chain (about 50-70 kD). The N-terminus of each chain defines a variable region of about 100 to 110 or more amino acids primarily responsible for antigen recognition. The terms variable light chain (V_{L}) and variable heavy chain (V_{H}) refer to these light and heavy chains respectively.

[0104] Antibodies exist, e.g., as intact immunoglobulins or as a number of well-characterized fragments produced by digestion with various peptidases. Thus, e.g., pepsin digests an antibody below the disulfide linkages in the hinge region to produce F(ab)'₂, a dimer of Fab which itself is a light chain joined to V_{H}—C_{H}1 by a disulfide bond. The F(ab)'₂ may be reduced under mild conditions to break the disulfide linkage in the hinge region, thereby converting the F(ab)'₂ dimer into an Fab′ monomer. The Fab′ monomer is essentially Fab with part of the hinge region (see Fundamental Immunology (Paul ed., 3d ed. 1993). While various antibody fragments are defined in terms of the digestion of an intact antibody, one of skill will appreciate that such fragments may be synthesized de novo either chemically or by using recombinant DNA methodology. Thus, the term antibody, as used herein, also includes antibody fragments either produced by the modification of whole antibodies, or those synthesized de novo using recombinant DNA methodologies (e.g., single chain Fv) or those identified using phage display libraries (see, e.g., McCafferty et al., Nature 348:552-554 (1990))

[0105] For preparation of antibodies, e.g., recombinant, monoclonal, or polyclonal antibodies, many technique known in the art can be used (see, e.g., Kohler & Milstein, Nature 256:495-497 (1975); Kozbor et al., Immunology Today 4:72 (1983); Cole et al., pp. 77-96 in Monoclonal Antibodies and Cancer Therapy (1985); Coligan, Current Protocols in Immunology (1991); Harlow & Lane, Antibodies, A Laboratory Manual (1988); and Goding, Monoclonal Antibodies: Principles and Practice (2d ed. 1986)). Techniques for the production of single chain antibodies (U.S. Pat. No. 4,946,778) can be adapted to produce antibodies to polypeptides of this invention. Also, transgenic mice, or other organisms such as other mammals, may be used to express humanized antibodies. Alternatively, phage display technology can be used to identify antibodies and heteromeric Fab fragments that specifically bind to selected antigens (see, e.g., McCafferty et al., Nature 348:552-554 (1990); Marks et al., Biotechnology 10:779-783 (1992)).

[0106] A “chimeric antibody” is an antibody molecule in which (a) the constant region, or a portion thereof, is altered, replaced or exchanged so that the antigen binding site (variable region) is linked to a constant region of a different or altered class, effector function and/or species, or an entirely different molecule which confers new properties to the chimeric antibody, e.g., an enzyme, toxin, hormone, growth factor, drug, etc.; or (b) the variable region, or a portion thereof, is altered, replaced or exchanged with a variable region having a different or altered antigen specificity.

### Identification of Prostate Cancer-Associated Sequences

[0107] In one aspect, the expression levels of genes are determined in different patient samples for which diagnosis information is desired, to provide expression profiles. An expression profile of a particular sample is essentially a “fingerprint” of the state of the sample; while two states may have any particular gene similarly expressed, the evaluation of a number of genes simultaneously allows the generation of a gene expression profile that is characteristic of the state of the cell. That is, normal tissue (e.g., normal prostate or other tissue) may be distinguished from cancerous or metastatic cancerous tissue of the prostate, or prostate cancer tissue or metastatic prostate cancerous tissue can be compared with tissue samples of prostate and other tissues from surviving cancer patients. By comparing expression profiles of tissue in known different prostate cancer states, information regarding which genes are important (including both up- and down-regulation of genes) in each of these states is obtained.

[0108] The identification of sequences that are differentially expressed in prostate cancer versus non-prostate cancer tissue allows the use of this information in a number of ways. For example, a particular treatment regime may be evaluated: does a chemotherapeutic drug act to down-regulate prostate cancer, and thus tumor growth or recurrence, in a particular patient. Similarly, diagnosis and treatment outcomes may be done or confirmed by comparing patient samples with the known expression profiles. Metastatic tissue can also be analyzed to determine the stage of prostate cancer in the tissue. Furthermore, these gene expression profiles (or individual genes) allow screening of drug candidates with an eye to mimicking or altering a particular expression profile; e.g., screening can be done for drugs that suppress the prostate cancer expression profile. This may be done by making biochips comprising sets of the important prostate cancer genes, which can then be used in these screens. These methods can also be done on the protein basis; that is, protein expression levels of the prostate cancer proteins can be evaluated for diagnostic purposes or to screen candidate agents. In addition, the prostate cancer nucleic acid sequences can be administered for gene therapy purposes, including the administration of antisense nucleic acids, or the prostate cancer proteins (including antibodies and other modulators thereof) administered as therapeutic drugs.

[0109] Thus the present invention provides nucleic acid and protein sequences that are differentially expressed in prostate cancer, herein termed “prostate cancer sequences.” As outlined below, prostate cancer sequences include those that are up-regulated (i.e., expressed at a higher level) in prostate cancer, as well as those that are down-regulated (i.e., expressed at a lower level). In a preferred embodiment, the prostate cancer sequences are from humans; however, as will be appreciated by those in the art, prostate cancer sequences from other organisms may be useful in animal models of disease and drug evaluation; thus, other prostate cancer sequences are provided, from vertebrates, including mammals, including rodents (rats, mice, hamsters, guinea pigs, etc.), primates, farm animals (including sheep, goats, pigs, cows, horses, etc.) and pets, e.g., (dogs, cats, etc.). Prostate cancer sequences from other organisms may be obtained using the techniques outlined below.

[0110] Prostate cancer sequences can include both nucleic acid and amino acid sequences. As will be appreciated by those in the art and is more fully outlined below, prostate cancer nucleic acid sequences are useful in a variety of applications, including diagnostic applications, which will detect naturally occurring nucleic acids, as well as screening applications; e.g., biochips comprising nucleic acid probes or PCR microtiter plates with selected probes to the prostate cancer sequences can be generated.

[0111] A prostate cancer sequence can be initially identified by substantial nucleic acid and/or amino acid sequence homology to the prostate cancer sequences outlined herein. Such homology can be based upon the overall nucleic acid or amino acid sequence, and is generally determined as outlined below, using either homology programs or hybridization conditions.

[0112] For identifying prostate cancer-associated sequences, the prostate cancer screen typically includes comparing genes identified in different tissues, e.g., normal and cancerous tissues, or tumor tissue samples from patients who have metastatic disease vs. non metastatic tissue. Other suitable tissue comparisons include comparing prostate cancer samples with metastatic cancer samples from other cancers, such as lung, breast, gastrointestinal cancers, ovarian, etc. Samples of different stages of prostate cancer, e.g., survivor tissue, drug resistant states, and tissue undergoing metastasis, are applied to biochips comprising nucleic acid probes. The samples are first microdissected, if applicable, and treated as is known in the art for the preparation of mRNA. Suitable biochips are commercially available, e.g. from Affymetrix. Gene expression profiles as described herein are generated and the data analyzed.

[0113] In one embodiment, the genes showing changes in expression as between normal and disease states are compared to genes expressed in other normal tissues, preferably normal prostate, but also including, and not limited to lung, heart, brain, liver, breast, kidney, muscle, colon, small intestine, large intestine, spleen, bone and placenta. In a preferred embodiment, those genes identified during the prostate cancer screen that are expressed in any significant amount in other tissues are removed from the profile, although in some embodiments, this is not necessary. That is, when screening for drugs, it is usually preferable that the target be disease specific, to minimize possible side effects.

[0114] In a preferred embodiment, prostate cancer sequences are those that are up-regulated in prostate cancer; that is, the expression of these genes is higher in the prostate cancer tissue as compared to non-cancerous tissue. “Up-regulation” as used herein often means at least about a two-fold change, preferably at least about a three fold change, with at least about five-fold or higher being preferred. All unigene cluster identification numbers and accession numbers herein are for the GenBank sequence database and the sequences of the accession numbers are hereby expressly incorporated by reference. GenBank is known in the art, see, e.g., Benson, D A, et al., Nucleic Acids Research 26:1-7 (1998) and http://www.ncbi.nlm.nih.gov/. Sequences are also available in other databases, e.g., European Molecular Biology Laboratory (EMBL) and DNA Database of Japan (DDBJ).

[0115] In another preferred embodiment, prostate cancer sequences are those that are down-regulated in prostate cancer; that is, the expression of these genes is lower in prostate cancer tissue as compared to non-cancerous tissue (see, e.g., Tables 8, 12 and 14). “Down-regulation” as used herein often means at least about a 1.5-fold change more preferrably a two-fold change, preferably at least about a three fold change, with at least about five-fold or higher being most preferred.

### Informatics

[0116] The ability to identify genes that are over or under expressed in prostate cancer can additionally provide high-resolution, high-sensitivity datasets which can be used in the areas of diagnostics, therapeutics, drug development, pharmacogenetics, protein structure, biosensor development, and other related areas. For example, the expression profiles can be used in diagnostic or prognostic evaluation of patients with prostate cancer. Or as another example, subcellular toxicological information can be generated to better direct drug structure and activity correlation (see Anderson, Pharmaceutical Proteomics: Targets, Mechanism, and Function, paper presented at the IBC Proteomics conference, Coronado, Calif. (Jun. 11-12, 1998)). Subcellular toxicological information can also be utilized in a biological sensor device to predict the likely toxicological effect of chemical exposures and likely tolerable exposure thresholds (see U.S. Pat. No. 5,811,231). Similar advantages accrue from datasets relevant to other biomolecules and bioactive agents (e.g., nucleic acids, saccharides, lipids, drugs, and the like).

[0117] Thus, in another embodiment, the present invention provides a database that includes at least one set of assay data. The data contained in the database is acquired, e.g., using array analysis either singly or in a library format. The database can be in substantially any form in which data can be maintained and transmitted, but is preferably an electronic database. The electronic database of the invention can be maintained on any electronic device allowing for the storage of and access to the database, such as a personal computer, but is preferably distributed on a wide area network, such as the World Wide Web.

[0118] The focus of the present section on databases that include peptide sequence data is for clarity of illustration only. It will be apparent to those of skill in the art that similar databases can be assembled for any assay data acquired using an assay of the invention.

[0119] The compositions and methods for identifying and/or quantitating the relative and/or absolute abundance of a variety of molecular and macromolecular species from a biological sample undergoing prostate cancer, i.e., the identification of prostate cancer-associated sequences described herein, provide an abundance of information, which can be correlated with pathological conditions, predisposition to disease, drug testing, therapeutic monitoring, gene-disease causal linkages, identification of correlates of immunity and physiological status, among others. Although the data generated from the assays of the invention is suited for manual review and analysis, in a preferred embodiment, prior data processing using high-speed computers is utilized.

[0120] An array of methods for indexing and retrieving biomolecular information is known in the art. For example, U.S. Pat. Nos. 6,023,659 and 5,966,712 disclose a relational database system for storing biomolecular sequence information in a manner that allows sequences to be catalogued and searched according to one or more protein function hierarchies. U.S. Pat. No. 5,953,727 discloses a relational database having sequence records containing information in a format that allows a collection of partial-length DNA sequences to be catalogued and searched according to association with one or more sequencing projects for obtaining full-length sequences from the collection of partial length sequences. U.S. Pat. No. 5,706,498 discloses a gene database retrieval system for making a retrieval of a gene sequence similar to a sequence data item in a gene database based on the degree of similarity between a key sequence and a target sequence. U.S. Pat. No. 5,538,897 discloses a method using mass spectroscopy fragmentation patterns of peptides to identify amino acid sequences in computer databases by comparison of predicted mass spectra with experimentally-derived mass spectra using a closeness-of-fit measure. U.S. Pat. No. 5,926,818 discloses a multi-dimensional database comprising a functionality for multi-dimensional data analysis described as on-line analytical processing (OLAP), which entails the consolidation of projected and actual data according to more than one consolidation path or dimension. U.S. Pat. No. 5,295,261 reports a hybrid database structure in which the fields of each database record are divided into two classes, navigational and informational data, with navigational fields stored in a hierarchical topological map which can be viewed as a tree structure or as the merger of two or more such tree structures.

[0121] See also Mount et al., Bioinformatics (2001); Biological Sequence Analysis: Probabilistic Models of Proteins and Nucleic Acids (Durbin et al., eds., 1999); Bioinformatics: A Practical Guide to the Analysis of Genes and Proteins (Baxevanis & Oeullette eds., 1998)); Rashidi & Buehler, Bioinformatics: Basic Applications in Biological Science and Medicine (1999); Introduction to Computational Molecular Biology (Setubal et al., eds 1997); Bioinformatics: Methods and Protocols (Misener & Krawetz, eds, 2000); Bioinformatics: Sequence, Structure, and Databanks: A Practical Approach (Higgins & Taylor, eds., 2000); Brown, Bioinformatics: A Biologist's Guide to Biocomputing and the Internet (2001); Han & Kamber, Data Mining: Concepts and Techniques (2000); and Waterman, Introduction to Computational Biology: Maps, Sequences, and Genomes (1995).

[0122] The present invention provides a computer database comprising a computer and software for storing in computer-retrievable form assay data records cross-tabulated, e.g., with data specifying the source of the target-containing sample from which each sequence specificity record was obtained.

[0123] In an exemplary embodiment, at least one of the sources of target-containing sample is from a control tissue sample known to be free of pathological disorders. In a variation, at least one of the sources is a known pathological tissue specimen, e.g., a neoplastic lesion or another tissue specimen to be analyzed for prostate cancer. In another variation, the assay records cross-tabulate one or more of the following parameters for each target species in a sample: (1) a unique identification code, which can include, e.g., a target molecular structure and/or characteristic separation coordinate (e.g., electrophoretic coordinates); (2) sample source; and (3) absolute and/or relative quantity of the target species present in the sample.

[0124] The invention also provides for the storage and retrieval of a collection of target data in a computer data storage apparatus, which can include magnetic disks, optical disks, magneto-optical disks, DRAM, SRAM, SGRAM, SDRAM, RDRAM, DDR RAM, magnetic bubble memory devices, and other data storage devices, including CPU registers and on-CPU data storage arrays. Typically, the target data records are stored as a bit pattern in an array of magnetic domains on a magnetizable medium or as an array of charge states or transistor gate states, such as an array of cells in a DRAM device (e.g., each cell comprised of a transistor and a charge storage area, which may be on the transistor). In one embodiment, the invention provides such storage devices, and computer systems built therewith, comprising a bit pattern encoding a protein expression fingerprint record comprising unique identifiers for at least 10 target data records cross-tabulated with target source.

[0125] When the target is a peptide or nucleic acid, the invention preferably provides a method for identifying related peptide or nucleic acid sequences, comprising performing a computerized comparison between a peptide or nucleic acid sequence assay record stored in or retrieved from a computer storage device or database and at least one other sequence. The comparison can include a sequence analysis or comparison algorithm or computer program embodiment thereof (e.g., FASTA, TFASTA, GAP, BESTFIT) and/or the comparison may be of the relative amount of a peptide or nucleic acid sequence in a pool of sequences determined from a polypeptide or nucleic acid sample of a specimen.

[0126] The invention also preferably provides a magnetic disk, such as an IBM-compatible (DOS, Windows, Windows95/98/2000, Windows NT, OS/2) or other format (e.g., Linux, SunOS, Solaris, AIX, SCO Unix, VMS, MV, Macintosh, etc.) floppy diskette or hard (fixed, Winchester) disk drive, comprising a bit pattern encoding data from an assay of the invention in a file format suitable for retrieval and processing in a computerized sequence analysis, comparison, or relative quantitation method.

[0127] The invention also provides a network, comprising a plurality of computing devices linked via a data link, such as an Ethernet cable (coax or 10BaseT), telephone line, ISDN line, wireless network, optical fiber, or other suitable signal transmission medium, whereby at least one network device (e.g., computer, disk array, etc.) comprises a pattern of magnetic domains (e.g., magnetic disk) and/or charge domains (e.g., an array of DRAM cells) composing a bit pattern encoding data acquired from an assay of the invention.

[0128] The invention also provides a method for transmitting assay data that includes generating an electronic signal on an electronic communications device, such as a modem, ISDN terminal adapter, DSL, cable modem, ATM switch, or the like, wherein the signal includes (in native or encrypted format) a bit pattern encoding data from an assay or a database comprising a plurality of assay results obtained by the method of the invention.

[0129] In a preferred embodiment, the invention provides a computer system for comparing a query target to a database containing an array of data structures, such as an assay result obtained by the method of the invention, and ranking database targets based on the degree of identity and gap weight to the target data. A central processor is preferably initialized to load and execute the computer program for alignment and/or comparison of the assay results. Data for a query target is entered into the central processor via an I/O device. Execution of the computer program results in the central processor retrieving the assay data from the data file, which comprises a binary description of an assay result.

[0130] The target data or record and the computer program can be transferred to secondary memory, which is typically random access memory (e.g., DRAM, SRAM, SGRAM, or SDRAM). Targets are ranked according to the degree of correspondence between a selected assay characteristic (e.g., binding to a selected affinity moiety) and the same characteristic of the query target and results are output via an I/O device. For example, a central processor can be a conventional computer (e.g., Intel Pentium, PowerPC, Alpha, PA-8000, SPARC, MIPS 4400, MIPS 10000, VAX, etc.); a program can be a commercial or public domain molecular biology software package (e.g., UWGCG Sequence Analysis Software, Darwin); a data file can be an optical or magnetic disk, a data server, a memory device (e.g., DRAM, SRAM, SGRAM, SDRAM, EPROM, bubble memory, flash memory, etc.); an I/O device can be a terminal comprising a video display and a keyboard, a modem, an ISDN terminal adapter, an Ethernet port, a punched card reader, a magnetic strip reader, or other suitable I/O device.

[0131] The invention also preferably provides the use of a computer system, such as that described above, which comprises: (1) a computer; (2) a stored bit pattern encoding a collection of peptide sequence specificity records obtained by the methods of the invention, which may be stored in the computer; (3) a comparison target, such as a query target; and (4) a program for alignment and comparison, typically with rank-ordering of comparison results on the basis of computed similarity values.

### Characteristics of Prostate Cancer-Associated Proteins

[0132] Prostate cancer proteins of the present invention may be classified as secreted proteins, transmembrane proteins or intracellular proteins. In one embodiment, the prostate cancer protein is an intracellular protein. Intracellular proteins may be found in the cytoplasm and/or in the nucleus. Intracellular proteins are involved in all aspects of cellular function and replication (including, e.g., signaling pathways); aberrant expression of such proteins often results in unregulated or disregulated cellular processes (see, e.g., Molecular Biology of the Cell (Alberts, ed., 3rd ed., 1994). For example, many intracellular proteins have enzymatic activity such as protein kinase activity, protein phosphatase activity, protease activity, nucleotide cyclase activity, polymerase activity and the like. Intracellular proteins also serve as docking proteins that are involved in organizing complexes of proteins, or targeting proteins to various subcellular localizations, and are involved in maintaining the structural integrity of organelles.

[0133] An increasingly appreciated concept in characterizing proteins is the presence in the proteins of one or more motifs for which defined functions have been attributed. In addition to the highly conserved sequences found in the enzymatic domain of proteins, highly conserved sequences have been identified in proteins that are involved in protein-protein interaction. For example, Src-homology-2 (SH2) domains bind tyrosine-phosphorylated targets in a sequence dependent manner. PTB domains, which are distinct from SH2 domains, also bind tyrosine phosphorylated targets. SH3 domains bind to proline-rich targets. In addition, PH domains, tetratricopeptide repeats and WD domains to name only a few, have been shown to mediate protein-protein interactions. Some of these may also be involved in binding to phospholipids or other second messengers. As will be appreciated by one of ordinary skill in the art, these motifs can be identified on the basis of primary sequence; thus, an analysis of the sequence of proteins may provide insight into both the enzymatic potential of the molecule and/or molecules with which the protein may associate. One useful database is Pfam (protein families), which is a large collection of multiple sequence alignments and hidden Markov models covering many common protein domains. Versions are available via the interne from Washington University in St. Louis, the Sanger Center in England, and the Karolinskai Institute in Sweden (see, e.g., Bateman et al., Nuc. Acids Res. 28:263-266 (2000); Sonnhammer et al., Proteins 28:405-420 (1997); Bateman et al., Nuc. Acids Res. 27:260-262 (1999); and Sonnhammer et al., Nuc. Acids Res. 26:320-322-(1998)).

[0134] In another embodiment, the prostate cancer sequences are transmembrane proteins. Transmembrane proteins are molecules that span a phospholipid bilayer of a cell. They may have an intracellular domain, an extracellular domain, or both. The intracellular domains of such proteins may have a number of functions including those already described for intracellular proteins. For example, the intracellular domain may have enzymatic activity and/or may serve as a binding site for additional proteins. Frequently the intracellular domain of transmembrane proteins serves both roles. For example certain receptor tyrosine kinases have both protein kinase activity and SH2 domains. In addition, autophosphorylation of tyrosines on the receptor molecule itself, creates binding sites for additional SH2 domain containing proteins.

[0135] Transmembrane proteins may contain from one to many transmembrane domains. For example, receptor tyrosine kinases, certain cytokine receptors, receptor guanylyl cyclases and receptor serine/threonine protein kinases contain a single transmembrane domain. However, various other proteins including channels and adenylyl cyclases contain numerous transmembrane domains. Many important cell surface receptors such as G protein coupled receptors (GPCRs) are classified as “seven transmembrane domain” proteins, as they contain 7 membrane spanning regions. Characteristics of transmembrane domains include approximately 20 consecutive hydrophobic amino acids that may be followed by charged amino acids. Therefore, upon analysis of the amino acid sequence of a particular protein, the localization and number of transmembrane domains within the protein may be predicted (see, e.g. PSORT web site http://psort.nibb.ac.jpf). Important transmembrane protein receptors include, but are not limited to the insulin receptor, insulin-like growth factor receptor, human growth hormone receptor, glucose transporters, transferrin receptor, epidermal growth factor receptor, low density lipoprotein receptor, epidermal growth factor receptor, leptin receptor, interleukin receptors, e.g. IL-1 receptor, IL-2 receptor,

[0136] The extracellular domains of transmembrane proteins are diverse; however, conserved motifs are found repeatedly among various extracellular domains. Conserved structure and/or functions have been ascribed to different extracellular motifs. Many extracellular domains are involved in binding to other molecules. In one aspect, extracellular domains are found on receptors. Factors that bind the receptor domain include circulating ligands, which may be peptides, proteins, or small molecules such as adenosine and the like. For example, growth factors such as EGF, FGF and PDGF are circulating growth factors that bind to their cognate receptors to initiate a variety of cellular responses. Other factors include cytokines, mitogenic factors, neurotrophic factors and the like. Extracellular domains also bind to cell-associated molecules. In this respect, they mediate cell-cell interactions. Cell-associated ligands can be tethered to the cell, e.g., via a glycosylphosphatidylinositol (GPI) anchor, or may themselves be transmembrane proteins. Extracellular domains also associate with the extracellular matrix and contribute to the maintenance of the cell structure.

[0137] Prostate cancer proteins that are transmembrane are particularly preferred in the present invention as they are readily accessible targets for immunotherapeutics, as are described herein. In addition, as outlined below, transmembrane proteins can be also useful in imaging modalities. Antibodies may be used to label such readily accessible proteins in situ. Alternatively, antibodies can also label intracellular proteins, in which case samples are typically permeablized to provide access to intracellular proteins.

[0138] It will also be appreciated by those in the art that a transmembrane protein can be made soluble by removing transmembrane sequences, e.g., through recombinant methods. Furthermore, transmembrane proteins that have been made soluble can be made to be secreted through recombinant means by adding an appropriate signal sequence.

[0139] In another embodiment, the prostate cancer proteins are secreted proteins; the secretion of which can be either constitutive or regulated. These proteins have a signal peptide or signal sequence that targets the molecule to the secretory pathway. Secreted proteins are involved in numerous physiological events; by virtue of their circulating nature, they serve to transmit signals to various other cell types. The secreted protein may function in an autocrine manner (acting on the cell that secreted the factor), a paracrine manner (acting on cells in close proximity to the cell that secreted the factor) or an endocrine manner (acting on cells at a distance). Thus secreted molecules find use in modulating or altering numerous aspects of physiology. Prostate cancer proteins that are secreted proteins are particularly preferred in the present invention as they serve as good targets for diagnostic markers, e.g., for blood, plasma, serum, or stool tests.

### Use of Prostate Cancer Nucleic Acids

[0140] As described above, prostate cancer sequence is initially identified by substantial nucleic acid and/or amino acid sequence homology or linkage to the prostate cancer sequences outlined herein. Such homology can be based upon the overall nucleic acid or amino acid sequence, and is generally determined as outlined below, using either homology programs or hybridization conditions. Typically, linked sequences on a mRNA are found on the same molecule.

[0141] The prostate cancer nucleic acid sequences of the invention, e.g., the sequences in Tables 1-16, can be fragments of larger genes, i.e., they are nucleic acid segments. “Genes” in this context includes coding regions, non-coding regions, and mixtures of coding and non-coding regions. Accordingly, as will be appreciated by those in the art, using the sequences provided herein, extended sequences, in either direction, of the prostate cancer genes can be obtained, using techniques well known in the art for cloning either longer sequences or the full length sequences; see Ausubel, et al., supra. Much can be done by informatics and many sequences can be clustered to include multiple sequences corresponding to a single gene, e.g., systems such as UniGene (see, http://www.ncbi.nlm.nih.gov/UniGene/).

[0142] Once the prostate cancer nucleic acid is identified, it can be cloned and, if necessary, its constituent parts recombined to form the entire prostate cancer nucleic acid coding regions or the entire mRNA sequence. Once isolated from its natural source, e.g., contained within a plasmid or other vector or excised therefrom as a linear nucleic acid segment, the recombinant prostate cancer nucleic acid can be further-used as a probe to identify and isolate other prostate cancer nucleic acids, e.g., extended coding regions. It can also be used as a “precursor” nucleic acid to make modified or variant prostate cancer nucleic acids and proteins.

[0143] The prostate cancer nucleic acids of the present invention are used in several ways. In a first embodiment, nucleic acid probes to the prostate cancer nucleic acids are made and attached to biochips to be used in screening and diagnostic methods, as outlined below, or for administration, e.g., for gene therapy, vaccine, and/or antisense applications. Alternatively, the prostate cancer nucleic acids that include coding regions of prostate cancer proteins can be put into expression vectors for the expression of prostate cancer proteins, again for screening purposes or for administration to a patient.

[0144] In a preferred embodiment, nucleic acid probes to prostate cancer nucleic acids (both the nucleic acid sequences outlined in the figures and/or the complements thereof) are made. The nucleic acid probes attached to the biochip are designed to be substantially complementary to the prostate cancer nucleic acids, i.e. the target sequence (either the target sequence of the sample or to other probe sequences, e.g., in sandwich assays), such that hybridization of the target sequence and the probes of the present invention occurs. As outlined below, this complementarity need not be perfect; there may be any number of base pair mismatches which will interfere with hybridization between the target sequence and the single stranded nucleic acids of the present invention. However, if the number of mutations is so great that no hybridization can occur under even the least stringent of hybridization conditions, the sequence is not a complementary target sequence. Thus, by “substantially complementary” herein is meant that the probes are sufficiently complementary to the target sequences to hybridize under normal reaction conditions, particularly high stringency conditions, as outlined herein.

[0145] A nucleic acid probe is generally single stranded but can be partially single and partially double stranded. The strandedness of the probe is dictated by the structure, composition, and properties of the target sequence. In general, the nucleic acid probes range from about 8 to about 100 bases long, with from about 10 to about 80 bases being preferred, and from about 30 to about 50 bases being particularly preferred. That is, generally whole genes are not used. In some embodiments, much longer nucleic acids can be used, up to hundreds of bases.

[0146] In a preferred embodiment, more than one probe per sequence is used, with either overlapping probes or probes to different sections of the target being used. That is, two, three, four or more probes, with three being preferred, are used to build in a redundancy for a particular target. The probes can be overlapping (i.e., have some sequence in common), or separate. In some cases, PCR primers may be used to amplify signal for higher sensitivity.

[0147] As will be appreciated by those in the art, nucleic acids can be attached or immobilized to a solid support in a wide variety of ways. By “immobilized” and grammatical equivalents herein is meant the association or binding between the nucleic acid probe and the solid support is sufficient to be stable under the conditions of binding, washing, analysis, and removal as outlined below. The binding can typically be covalent or non-covalent. By “non-covalent binding” and grammatical equivalents herein is meant one or more of electrostatic, hydrophilic, and hydrophobic interactions. Included in non-covalent binding is the covalent attachment of a molecule, such as, streptavidin to the support and the non-covalent binding of the biotinylated probe to the streptavidin. By “covalent binding” and grammatical equivalents herein is meant that the two moieties, the solid support and the probe, are attached by at least one bond, including sigma bonds, pi bonds and coordination bonds. Covalent bonds can be formed directly between the probe and the solid support or can be formed by a cross linker or by inclusion of a specific reactive group on either the solid support or the probe or both molecules. Immobilization may also involve a combination of covalent and non-covalent interactions.

[0148] In general, the probes are attached to the biochip in a wide variety of ways, as will be appreciated by those in the art. As described herein, the nucleic acids can either be synthesized first, with subsequent attachment to the biochip, or can be directly synthesized on the biochip.

[0149] The biochip comprises a suitable solid substrate. By “substrate” or “solid support” or other grammatical equivalents herein is meant a material that can be modified to contain discrete individual sites appropriate for the attachment or association of the nucleic acid probes and is amenable to at least one detection method. As will be appreciated by those in the art, the number of possible substrates are very large, and include, but are not limited to, glass and modified or functionalized glass, plastics (including acrylics, polystyrene and copolymers of styrene and other materials, polypropylene, polyethylene, polybutylene, polyurethanes, TeflonJ, etc.), polysaccharides, nylon or nitrocellulose, resins, silica or silica-based materials including silicon and modified silicon, carbon, metals, inorganic glasses, plastics, etc. In general, the substrates allow optical detection and do not appreciably fluoresce. A preferred substrate is described in copending application entitled Reusable Low Fluorescent Plastic Biochip, U.S. application Ser. No. 09/270,214, filed Mar. 15, 1999, herein incorporated by reference in its entirety.

[0150] Generally the substrate is planar, although as will be appreciated by those in the art, other configurations of substrates may be used as well. For example, the probes may be placed on the inside surface of a tube, for flow-through sample analysis to minimize sample volume. Similarly, the substrate may be flexible, such as a flexible foam, including closed cell foams made of particular plastics.

[0151] In a preferred embodiment, the surface of the biochip and the probe may be derivatized with chemical functional groups for subsequent attachment of the two. Thus, e.g., the biochip is derivatized with a chemical functional group including, but not limited to, amino groups, carboxy groups, oxo groups and thiol groups, with amino groups being particularly preferred. Using these functional groups, the probes can be attached using functional groups on the probes. For example, nucleic acids containing amino groups can be attached to surfaces comprising amino groups, e.g. using linkers as are known in the art; e.g., homo- or hetero-bifunctional linkers as are well known (see 1994 Pierce Chemical Company catalog, technical section on cross-linkers, pages 155-200). In addition, in some cases, additional linkers, such as alkyl groups (including substituted and heteroalkyl groups) may be used.

[0152] In this embodiment, oligonucleotides are synthesized as is known in the art, and then attached to the surface of the solid support. As will be appreciated by those skilled in the art, either the 5′ or 3′ terminus may be attached to the solid support, or attachment may be via an internal nucleoside.

[0153] In another embodiment, the immobilization to the solid support may be very strong, yet non-covalent. For example, biotinylated oligonucleotides can be made, which bind to surfaces covalently coated with streptavidin, resulting in attachment.

[0154] Alternatively, the oligonucleotides may be synthesized on the surface, as is known in the art. For example, photoactivation techniques utilizing photopolymerization compounds and techniques are used. In a preferred embodiment, the nucleic acids can be synthesized in situ, using well known photolithographic techniques, such as those described in WO 95/25116; WO 95/35505; U.S. Pat. Nos. 5,700,637 and 5,445,934; and references cited within, all of which are expressly incorporated by reference; these methods of attachment form the basis of the Affimetrix GeneChip™ technology.

[0155] Often, amplification-based assays are performed to measure the expression level of prostate cancer-associated sequences. These assays are typically performed in conjunction with reverse transcription. In such assays, a prostate cancer-associated nucleic acid sequence acts as a template in an amplification reaction (e.g., Polymerase Chain Reaction, or PCR). In a quantitative amplification, the amount of amplification product will be proportional to the amount of template in the original sample. Comparison to appropriate controls provides a measure of the amount of prostate cancer-associated RNA. Methods of quantitative amplification are well known to those of skill in the art. Detailed protocols for quantitative PCR are provided, e.g., in Innis et al., PCR Protocols, A Guide to Methods and Applications (1990).

[0156] In some embodiments, a TaqMan based assay is used to measure expression. TaqMan based assays use a fluorogenic oligonucleotide probe that contains a 5′ fluorescent dye and a 3′ quenching agent. The probe hybridizes to a PCR product, but cannot itself be extended due to a blocking agent at the 3′ end. When the PCR product is amplified in subsequent cycles, the 5′ nuclease activity of the polymerase, e.g., AmpliTaq, results in the cleavage of the TaqMan probe. This cleavage separates the 5′ fluorescent dye and the 3′ quenching agent, thereby resulting in an increase in fluorescence as a function of amplification (see, e.g., literature provided by Perkin-Elmer, e.g., www2.perkin-elmer.com).

[0157] Other suitable amplification methods include, but are not limited to, ligase chain reaction (LCR) (see Wu & Wallace, Genomics 4:560 (1989), Landegren et al., Science 241:1077 (1988), and Barringer et al., Gene 89:117 (1990)), transcription amplification (Kwoh et al., Proc. Natl. Acad. Sci. USA 86:1173 (1989)), self-sustained sequence replication (Guatelli et al., Proc. Nat. Acad. Sci. USA 87:1874 (1990)), dot PCR, and linker adapter PCR, etc.

Expression of Prostate Cancer Proteins from Nucleic Acids

[0158] In a preferred embodiment, prostate cancer nucleic acids, e.g., encoding prostate cancer proteins are used to make a variety of expression vectors to express prostate cancer proteins which can then be used in screening assays, as described below. Expression vectors and recombinant DNA technology are well known to those of skill in the art (see, e.g., Ausubel, supra, and Gene Expression Systems (Fernandez & Hoeffler, eds, 1999)) and are used to express proteins. The expression vectors may be either self-replicating extrachromosomal vectors or vectors which integrate into a host genome. Generally, these expression vectors include transcriptional and translational regulatory nucleic acid operably linked to the nucleic acid encoding the prostate cancer protein. The term “control sequences” refers to DNA sequences used for the expression of an operably linked coding sequence in a particular host organism. Control sequences that are suitable for prokaryotes, e.g., include a promoter, optionally an operator sequence, and a ribosome binding site. Eukaryotic cells are known to utilize promoters, polyadenylation signals, and enhancers.

[0159] Nucleic acid is “operably linked” when it is placed into a functional relationship with another nucleic acid sequence. For example, DNA for a presequence or secretory leader is operably linked to DNA for a polypeptide if it is expressed as a preprotein that participates in the secretion of the polypeptide; a promoter or enhancer is operably linked to a coding sequence if it affects the transcription of the sequence; or a ribosome binding site is operably linked to a coding sequence if it is positioned so as to facilitate translation. Generally, “operably linked” means that the DNA sequences being linked are contiguous, and, in the case of a secretory leader, contiguous and in reading phase. However, enhancers do not have to be contiguous. Linking is typically accomplished by ligation at convenient restriction sites. If such sites do not exist, synthetic oligonucleotide adaptors or linkers are used in accordance with conventional practice. Transcriptional and translational regulatory nucleic acid will generally be appropriate to the host cell used to express the prostate cancer protein. Numerous types of appropriate expression vectors, and suitable regulatory sequences are known in the art for a variety of host cells.

[0160] In general, transcriptional and translational regulatory sequences may include, but are not limited to, promoter sequences, ribosomal binding sites, transcriptional start and stop sequences, translational start and stop sequences, and enhancer or activator sequences. In a preferred embodiment, the regulatory sequences include a promoter and transcriptional start and stop sequences.

[0161] Promoter sequences encode either constitutive or inducible promoters. The promoters may be either naturally occurring promoters or hybrid promoters. Hybrid promoters, which combine elements of more than one promoter, are also known in the art, and are useful in the present invention.

[0162] In addition, an expression vector may comprise additional elements. For example, the expression vector may have two replication systems, thus allowing it to be maintained in two organisms, e.g. in mammalian or insect cells for expression and in a procaryotic host for cloning and amplification. Furthermore, for integrating expression vectors, the expression vector contains at least one sequence homologous to the host cell genome, and preferably two homologous sequences which flank the expression construct. The integrating vector may be directed to a specific locus in the host cell by selecting the appropriate homologous sequence for inclusion in the vector. Constructs for integrating vectors are well known in the art (e.g., Fernandez & Hoeffler, supra).

[0163] In addition, in a preferred embodiment, the expression vector contains a selectable marker gene to allow the selection of transformed host cells. Selection genes are well known in the art and will vary with the host cell used.

[0164] The prostate cancer proteins of the present invention are produced by culturing a host cell transformed with an expression vector containing nucleic acid encoding a prostate cancer protein, under the appropriate conditions to induce or cause expression of the prostate cancer protein. Conditions appropriate for prostate cancer protein expression will vary with the choice of the expression vector and the host cell, and will be easily ascertained by one skilled in the art through routine experimentation or optimization. For example, the use of constitutive promoters in the expression vector will require optimizing the growth and proliferation of the host cell, while the use of an inducible promoter requires the appropriate growth conditions for induction. In addition, in some embodiments, the timing of the harvest is important. For example, the baculoviral systems used in insect cell expression are lytic viruses, and thus harvest time selection can be crucial for product yield.

[0165] Appropriate host cells include yeast, bacteria, archaebacteria, fungi, and insect and animal cells, including mammalian cells. Of particular interest are Saccharomyces cerevisiae and other yeasts, E. coli, Bacillus subtilis, Sf9 cells, C129 cells, 293 cells, Neurospora, BHK, CHO, COS, HeLa cells, HUVEC (human umbilical vein endothelial cells), THP1 cells (a macrophage cell line) and various other human cells and cell lines.

[0166] In a preferred embodiment, the prostate cancer proteins are expressed in mammalian cells. Mammalian expression systems are also known in the art, and include retroviral and adenoviral systems. One expression vector system is a retroviral vector system such as is generally described in PCT/US97/01019 and PCT/US97/01048, both of which are hereby expressly incorporated by reference. Of particular use as Mammalian promoters are the promoters from mammalian viral genes, since the viral genes are often highly expressed and have a broad host range. Examples include the SV40 early promoter, mouse mammary tumor virus LTR promoter, adenovirus major late promoter, herpes simplex virus promoter, and the CMV promoter (see, e.g., Fernandez & Hoeffler, supra). Typically, transcription termination and polyadenylation sequences recognized by mammalian cells are regulatory regions located 3′ to the translation stop codon and thus, together with the promoter elements, flank the coding sequence. Examples of transcription terminator and polyadenlyation signals include those derived form SV40.

[0167] The methods of introducing exogenous nucleic acid into mammalian hosts, as well as other hosts, is well known in the art, and will vary with the host cell used. Techniques include dextran-mediated transfection, calcium phosphate precipitation, polybrene mediated transfection, protoplast fusion, electroporation, viral infection, encapsulation of the polynucleotide(s) in liposomes, and direct microinjection of the DNA into nuclei.

[0168] In a preferred embodiment, prostate cancer proteins are expressed in bacterial systems. Bacterial expression systems are well known in the art. Promoters from bacteriophage may also be used and are known in the art. In addition, synthetic promoters and hybrid promoters are also useful; e.g., the tac promoter is a hybrid of the trp and lac promoter sequences. Furthermore, a bacterial promoter can include naturally occurring promoters of non-bacterial origin that have the ability to bind bacterial RNA polymerase and initiate transcription. In addition to a functioning promoter sequence, an efficient ribosome binding site is desirable. The expression vector may also include a signal peptide sequence that provides for secretion of the prostate cancer protein in bacteria. The protein is either secreted into the growth media (gram-positive bacteria) or into the periplasmic space, located between the inner and outer membrane of the cell (gram-negative bacteria). The bacterial expression vector may also include a selectable marker gene to allow for the selection of bacterial strains that have been transformed. Suitable selection genes include genes which render the bacteria resistant to drugs such as ampicillin, chloramphenicol, erythromycin, kanamycin, neomycin and tetracycline. Selectable markers also include biosynthetic genes, such as those in the histidine, tryptophan and leucine biosynthetic pathways. These components are assembled into expression vectors. Expression vectors for bacteria are well known in the art, and include vectors for Bacillus subtilis, E. coli, Streptococcus cremoris, and Streptococcus lividans, among others (e.g., Fernandez & Hoeffler, supra). The bacterial expression vectors are transformed into bacterial host cells using techniques well known in the art, such as calcium chloride treatment, electroporation, and others.

[0169] In one embodiment, prostate cancer proteins are produced in insect cells. Expression vectors for the transformation of insect cells, and in particular, baculovirus-based expression vectors, are well known in the art.

[0170] In a preferred embodiment, prostate cancer protein is produced in yeast cells. Yeast expression systems are well known in the art, and include expression vectors for Saccharomyces cerevisiae, Candida albicans and C. maltosa, Hansenula polymorpha, Kluyveromyces fragilis and K lactis, Pichia guillerimondii and P. pastoris, Schizosaccharomyces pombe, and Yarrowia lipolytica.

[0171] The prostate cancer protein may also be made as a fusion protein, using techniques well known in the art. Thus, e.g., for the creation of monoclonal antibodies, if the desired epitope is small, the prostate cancer protein may be fused to a carrier protein to form an immunogen. Alternatively, the prostate cancer protein may be made as a fusion protein to increase expression, or for other reasons. For example, when the prostate cancer protein is a prostate cancer peptide, the nucleic acid encoding the peptide may be linked to other nucleic acid for expression purposes.

[0172] In a preferred embodiment, the prostate cancer protein is purified or isolated after expression. Prostate cancer proteins may be isolated or purified in a variety of ways known to those skilled in the art depending on what other components are present in the sample. Standard purification methods include electrophoretic, molecular, immunological and chromatographic techniques, including ion exchange, hydrophobic, affinity, and reverse-phase HPLC chromatography, and chromatofocusing. For example, the prostate cancer protein may be purified using a standard anti-prostate cancer protein antibody column. Ultrafiltration and diafiltration techniques, in conjunction with protein concentration, are also useful. For general guidance in suitable purification techniques, see Scopes, Protein Purification (1982). The degree of purification necessary will vary depending on the use of the prostate cancer protein. In some instances no purification will be necessary.

[0173] Once expressed and purified if necessary, the prostate cancer proteins and nucleic acids are useful in a number of applications. They may be used as immunoselection reagents, as vaccine reagents, as screening agents, etc.

### Variants of Prostate Cancer Proteins

[0174] In one embodiment, the prostate cancer proteins are derivative or variant prostate cancer proteins as compared to the wild-type sequence. That is, as outlined more fully below, the derivative prostate cancer peptide will often contain at least one amino acid substitution, deletion or insertion, with amino acid substitutions being particularly preferred. The amino acid substitution, insertion or deletion may occur at any residue within the prostate cancer peptide.

[0175] Also included within one embodiment of prostate cancer proteins of the present invention are amino acid sequence variants. These variants typically fall into one or more of three classes: substitutional, insertional or deletional variants. These variants ordinarily are prepared by site specific mutagenesis of nucleotides in the DNA encoding the prostate cancer protein, using cassette or PCR mutagenesis or other techniques well known in the art, to produce DNA encoding the variant, and thereafter expressing the DNA in recombinant cell culture as outlined above. However, variant prostate cancer protein fragments having up to about 100-150 residues may be prepared by in vitro synthesis using established techniques. Amino acid sequence variants are characterized by the predetermined nature of the variation, a feature that sets them apart from naturally occurring allelic or interspecies variation of the prostate cancer protein amino acid sequence. The variants typically exhibit the same qualitative biological activity as the naturally occurring analogue, although variants can also be selected which have modified characteristics as will be more fully outlined below.

[0176] While the site or region for introducing an amino acid sequence variation is predetermined, the mutation per se need not be predetermined. For example, in order to optimize the performance of a mutation at a given site, random mutagenesis may be conducted at the target codon or region and the expressed prostate cancer variants screened for the optimal combination of desired activity. Techniques for making substitution mutations at predetermined sites in DNA having a known sequence are well known, e.g., M13 primer mutagenesis and PCR mutagenesis. Screening of the mutants is done using assays of prostate cancer protein activities.

[0177] Amino acid substitutions are typically of single residues; insertions usually will be on the order of from about 1 to 20 amino acids, although considerably larger insertions may be tolerated. Deletions range from about 1 to about 20 residues, although in some cases deletions may be much larger.

[0178] Substitutions, deletions, insertions or any combination thereof may be used to arrive at a final derivative. Generally these changes are done on a few amino acids to minimize the alteration of the molecule. However, larger changes may be tolerated in certain circumstances. When small alterations in the characteristics of the prostate cancer protein are desired, substitutions are generally made in accordance with the amino acid substitution relationships provided in the definition section.

[0179] The variants typically exhibit the same qualitative biological activity and will elicit the same immune response as the naturally-occurring analog, although variants also are selected to modify the characteristics of the prostate cancer proteins as needed. Alternatively, the variant may be designed such that the biological activity of the prostate cancer protein is altered. For example, glycosylation sites may be altered or removed.

[0180] Substantial changes in function or immunological identity are made by selecting substitutions that are less conservative than those described above. For example, substitutions may be made which more significantly affect: the structure of the polypeptide backbone in the area of the alteration, for example the alpha-helical or beta-sheet structure; the charge or hydrophobicity of the molecule at the target site; or the bulk of the side chain. The substitutions which in general are expected to produce the greatest changes in the polypeptide's properties are those in which (a) a hydrophilic residue, e.g. seryl or threonyl is substituted for (or by) a hydrophobic residue, e.g. leucyl, isoleucyl, phenylalanyl, valyl or alanyl; (b) a cysteine or proline is substituted for (or by) any other residue; (c) a residue having an electropositive side chain, e.g. lysyl, arginyl, or histidyl, is substituted for (or by) an electronegative residue, e.g. glutamyl or aspartyl; or (d) a residue having a bulky side chain, e.g. phenylalanine, is substituted for (or by) one not having a side chain, e.g. glycine.

[0181] Covalent modifications of prostate cancer polypeptides are included within the scope of this invention. One type of covalent modification includes reacting targeted amino acid residues of a prostate cancer polypeptide with an organic derivatizing agent that is capable of reacting with selected side chains or the N- or C-terminal residues of a prostate cancer polypeptide. Derivatization with bifunctional agents is useful, for instance, for crosslinking prostate cancer polypeptides to a water-insoluble support matrix or surface for use in the method for purifying anti-prostate cancer polypeptide antibodies or screening assays, as is more fully described below. Commonly used crosslinking agents include, e.g., 1,1-bis(diazoacetyl)-2-phenylethane, glutaraldehyde, N-hydroxysuccinimide esters, e.g., esters with 4-azidosalicylic acid, homobifunctional imidoesters, including disuccinimidyl esters such as 3,3′-dithiobis(succinimidylpropionate), bifunctional maleimides such as bis-N-maleimido-1,8-octane and agents such as methyl-3-((p-azidophenyl)dithio)propioimidate.

[0182] Other modifications include deamidation of glutaminyl and asparaginyl residues to the corresponding glutamyl and aspartyl residues, respectively, hydroxylation of proline and lysine, phosphorylation of hydroxyl groups of seryl, threonyl or tyrosyl residues, methylation of the amino groups of the lysine, arginine, and histidine side chains (Creighton, Proteins: Structure and Molecular Properties, pp. 79-86 (1983)), acetylation of the N-terminal amine, and amidation of any C-terminal carboxyl group.

[0183] Another type of covalent modification of the prostate cancer polypeptide included within the scope of this invention comprises altering the native glycosylation pattern of the polypeptide. “Altering the native glycosylation pattern” is intended for purposes herein to mean deleting one or more carbohydrate moieties found in native sequence prostate cancer polypeptide, and/or adding one or more glycosylation sites that are not present in the native sequence prostate cancer polypeptide. Glycosylation patterns can be altered in many ways. For example the use of different cell types to express prostate cancer-associated sequences can result in different glycosylation patterns.

[0184] Addition of glycosylation sites to prostate cancer polypeptides may also be accomplished by altering the amino acid sequence thereof. The alteration may be made, e.g., by the addition of, or substitution by, one or more serine or threonine residues to the native sequence prostate cancer polypeptide (for O-linked glycosylation sites). The prostate cancer amino acid sequence may optionally be altered through changes at the DNA level, particularly by mutating the DNA encoding the prostate cancer polypeptide at preselected bases such that codons are generated that will translate into the desired amino acids.

[0185] Another means of increasing the number of carbohydrate moieties on the prostate cancer polypeptide is by chemical or enzymatic coupling of glycosides to the polypeptide. Such methods are described in the art, e.g., in WO 87/05330, and in Aplin & Wriston, CRC Crit. Rev. Biochem., pp. 259-306 (1981).

[0186] Removal of carbohydrate moieties present on the prostate cancer polypeptide may be accomplished chemically or enzymatically or by mutational substitution of codons encoding for amino acid residues that serve as targets for glycosylation. Chemical deglycosylation techniques are known in the art and described, for instance, by Hakimuddin, et al., Arch. Biochem. Biophys., 259:52 (1987) and by Edge et al., Anal. Biochem., 118:131 (1981). Enzymatic cleavage of carbohydrate moieties on polypeptides can be achieved by the use of a variety of endo- and exo-glycosidases as described by Thotakura et al., Meth. Enzymol., 138:350 (1987).

[0187] Another type of covalent modification of prostate cancer comprises linking the prostate cancer polypeptide to one of a variety of nonproteinaceous polymers, e.g., polyethylene glycol, polypropylene glycol, or polyoxyalkylenes, in the manner set forth in U.S. Pat. No. 4,640,835; 4,496,689; 4,301,144; 4,670,417; 4,791,192 or 4,179,337.

[0188] Prostate cancer polypeptides of the present invention may also be modified in a way to form chimeric molecules comprising a prostate cancer polypeptide fused to another, heterologous polypeptide or amino acid sequence. In one embodiment, such a chimeric molecule comprises a fusion of a prostate cancer polypeptide with a tag polypeptide which provides an epitope to which an anti-tag antibody can selectively bind. The epitope tag is generally placed at the amino- or carboxyl-terminus of the prostate cancer polypeptide. The presence of such epitope-tagged forms of a prostate cancer polypeptide can be detected using an antibody against the tag polypeptide. Also, provision of the epitope tag enables the prostate cancer polypeptide to be readily purified by affinity purification using an anti-tag antibody or another type of affinity matrix that binds to the epitope tag. In an alternative embodiment, the chimeric molecule may comprise a fusion of a prostate cancer polypeptide with an immunoglobulin or a particular region of an immunoglobulin. For a bivalent form of the chimeric molecule, such a fusion could be to the Fc region of an IgG molecule.

[0189] Various tag polypeptides and their respective antibodies are well known in the art. Examples include poly-histidine (poly-his) or poly-histidine-glycine (poly-his-gly) tags; HIS6 and metal chelation tags, the flu HA tag polypeptide and its antibody 12CA5 (Field et al., Mol. Cell. Biol. 8:2159-2165 (1988)); the c-myc tag and the 8F9, 3C7, 6E10, G4, B7 and 9E10 antibodies thereto (Evan et al., Molecular and Cellular Biology 5:3610-3616 (1985)); and the Herpes Simplex virus glycoprotein D (gD) tag and its antibody (Paborsky et al., Protein Engineering 3(6):547-553 (1990)). Other tag polypeptides include the Flag-peptide (Hopp et al., BioTechnology 6:1204-1210 (1988)); the KT3 epitope peptide (Martin et al., Science 255:192-194 (1992)); tubulin epitope peptide (Skinner et al., J. Biol. Chem. 266:15163-15166 (1991)); and the T7 gene 10 protein peptide tag (Lutz-Freyermuth et al., Proc. Natl. Acad. Sci. USA 87:6393-6397 (1990)).

[0190] Also included are other prostate cancer proteins of the prostate cancer family, and prostate cancer proteins from other organisms, which are cloned and expressed as outlined below. Thus, probe or degenerate polymerase chain reaction (PCR) primer sequences may be used to find other related prostate cancer proteins from humans or other organisms. As will be appreciated by those in the art, particularly useful probe and/or PCR primer sequences include the unique areas of the prostate cancer nucleic acid sequence. As is generally known in the art, preferred PCR primers are from about 15 to about 35 nucleotides in length, with from about 20 to about 30 being preferred, and may contain inosine as needed. The conditions for the PCR reaction are well known in the art (e.g., Innis, PCR Protocols, supra).

### Antibodies to Prostate Cancer Proteins

[0191] In a preferred embodiment, when the prostate cancer protein is to be used to generate antibodies, e.g., for immunotherapy or immunodiagnosis, the prostate cancer protein should share at least one epitope or determinant with the full length protein. By “epitope” or “determinant” herein is typically meant a portion of a protein which will generate and/or bind an antibody or T-cell receptor in the context of MHC. Thus, in most instances, antibodies made to a smaller prostate cancer protein will be able to bind to the full-length protein, particularly linear epitopes. In a preferred embodiment, the epitope is unique; that is, antibodies generated to a unique epitope show little or no cross-reactivity.

[0192] Methods of preparing polyclonal antibodies are known to the skilled artisan (e.g., Coligan, supra; and Harlow & Lane, supra). Polyclonal antibodies can be raised in a mammal, e.g., by one or more injections of an immunizing agent and, if desired, an adjuvant. Typically, the immunizing agent and/or adjuvant will be injected in the mammal by multiple subcutaneous or intraperitoneal injections. The immunizing agent may include a protein encoded by a nucleic acid of the figures or fragment thereof or a fusion protein thereof. It may be useful to conjugate the immunizing agent to a protein known to be immunogenic in the mammal being immunized. Examples of such immunogenic proteins include but are not limited to keyhole limpet hemocyanin, serum albumin, bovine thyroglobulin, and soybean trypsin inhibitor. Examples of adjuvants which may be employed include Freund's complete adjuvant and MPL-TDM adjuvant (monophosphoryl Lipid A, synthetic trehalose dicorynomycolate). The immunization protocol may be selected by one skilled in the art without undue experimentation.

[0193] The antibodies may, alternatively, be monoclonal antibodies. Monoclonal antibodies may be prepared using hybridoma methods, such as those described by Kohler & Milstein, Nature 256:495 (1975). In a hybridoma method, a mouse, hamster, or other appropriate host animal, is typically immunized with an immunizing agent to elicit lymphocytes that produce or are capable of producing antibodies that will specifically bind to the immunizing agent. Alternatively, the lymphocytes may be immunized in vitro. The immunizing agent will typically include a polypeptide encoded by a nucleic acid of Tables 1-16 fragment thereof, or a fusion protein thereof. Generally, either peripheral blood lymphocytes (“PBLs”) are used if cells of human origin are desired, or spleen cells or lymph node cells are used if non-human mammalian sources are desired. The lymphocytes are then fused with an immortalized cell line using a suitable fusing agent, such as polyethylene glycol, to form a hybridoma cell (Goding, Monoclonal Antibodies: Principles and Practice, pp. 59-103 (1986)). Immortalized cell lines are usually transformed mammalian cells, particularly myeloma cells of rodent, bovine and human origin. Usually, rat or mouse myeloma cell lines are employed. The hybridoma cells may be cultured in a suitable culture medium that preferably contains one or more substances that inhibit the growth or survival of the unfused, immortalized cells. For example, if the parental cells lack the enzyme hypoxanthine guanine phosphoribosyl transferase (HGPRT or HPRT), the culture medium for the hybridomas typically will include hypoxanthine, aminopterin, and thymidine (“HAT medium”), which substances prevent the growth of HGPRT-deficient cells.

[0194] In one embodiment, the antibodies are bispecific antibodies. Bispecific antibodies are monoclonal, preferably human or humanized, antibodies that have binding specificities for at least two different antigens or that have binding specificities for two epitopes on the same antigen. In one embodiment, one of the binding specificities is for a protein encoded by a nucleic acid Tables 1-16 or a fragment thereof, the other one is for any other antigen, and preferably for a cell-surface protein or receptor or receptor subunit, preferably one that is tumor specific. Alternatively, tetramer-type technology may create multivalent reagents.

[0195] In a preferred embodiment, the antibodies to prostate cancer protein are capable of reducing or eliminating a biological function of a prostate cancer protein, as is described below. That is, the addition of anti-prostate cancer protein antibodies (either polyclonal or preferably monoclonal) to prostate cancer tissue (or cells containing prostate cancer) may reduce or eliminate the prostate cancer. Generally, at least a 25% decrease in activity, growth, size or the like is preferred, with at least about 50% being particularly preferred and about a 95-100% decrease being especially preferred.

[0196] In a preferred embodiment the antibodies to the prostate cancer proteins are humanized antibodies (e.g., Xenerex Biosciences, Mederex, Inc., Abgenix, Inc., Protein Design Labs, Inc.) Humanized forms of non-human (e.g., murine) antibodies are chimeric molecules of immunoglobulins, immunoglobulin chains or fragments thereof (such as Fv, Fab, Fab′, F(ab′)2 or other antigen-binding subsequences of antibodies) which contain minimal sequence derived from non-human immunoglobulin. Humanized antibodies include human immunoglobulins (recipient antibody) in which residues from a complementary determining region (CDR) of the recipient are replaced by residues from a CDR of a non-human species (donor antibody) such as mouse, rat or rabbit having the desired specificity, affinity and capacity. In some instances, Fv framework residues of the human immunoglobulin are replaced by corresponding non-human residues. Humanized antibodies may also comprise residues which are found neither in the recipient antibody nor in the imported CDR or framework sequences. In general, a humanized antibody will comprise substantially all of at least one, and typically two, variable domains, in which all or substantially all of the CDR regions correspond to those of a non-human immunoglobulin and all or substantially all of the framework (FR) regions are those of a human immunoglobulin consensus sequence. The humanized antibody optimally also will comprise at least a portion of an immunoglobulin constant region (Fc), typically that of a human immunoglobulin (Jones et al., Nature 321:522-525 (1986); Riechmann et al., Nature 332:323-329 (1988); and Presta, Curr. Op. Struct. Biol. 2:593-596 (1992)). Humanization can be essentially performed following the method of Winter and co-workers (Jones et al., Nature 321:522-525 (1986); Riechmann et al, Nature 332:323-327 (1988); Verhoeyen et al., Science 239:1534-1536 (1988)), by substituting rodent CDRs or CDR sequences for the corresponding sequences of a human antibody. Accordingly, such humanized antibodies are chimeric antibodies (U.S. Pat. No. 4,816,567), wherein substantially less than an intact human variable domain has been substituted by the corresponding sequence from a non-human species.

[0197] Human antibodies can also be produced using various techniques known in the art, including phage display libraries (Hoogenboom & Winter, J. Mol. Biol. 227:381 (1991); Marks et al., J. Mol. Biol. 222:581 (1991)). The techniques of Cole et al. and Boerner et al. are also available for the preparation of human monoclonal antibodies (Cole et al., Monoclonal Antibodies and Cancer Therapy, p. 77 (1985) and Boerner et al., J. Immunol. 147(1):86-95 (1991)). Similarly, human antibodies can be made by introducing of human immunoglobulin loci into transgenic animals, e.g., mice in which the endogenous immunoglobulin genes have been partially or completely inactivated. Upon challenge, human antibody production is observed, which closely resembles that seen in humans in all respects, including gene rearrangement, assembly, and antibody repertoire. This approach is described, e.g., in U.S. Pat. Nos. 5,545,807; 5,545,806; 5,569,825; 5,625,126; 5,633,425; 5,661,016, and in the following scientific publications: Marks et al., Bio/Technology 10:779-783 (1992); Lonberg et al., Nature 368:856-859 (1994); Morrison, Nature 368:812-13 (1994); Fishwild et al., Nature Biotechnology 14:845-51 (1996); Neuberger, Nature Biotechnology 14:826 (1996); Lonberg & Huszar, Intern. Rev. Immunol. 13:65-93 (1995).

[0198] By immunotherapy is meant treatment of prostate cancer with an antibody raised against prostate cancer proteins. As used herein, immunotherapy can be passive or active. Passive immunotherapy as defined herein is the passive transfer of antibody to a recipient (patient). Active immunization is the induction of antibody and/or T-cell responses in a recipient (patient). Induction of an immune response is the result of providing the recipient with an antigen to which antibodies are raised. As appreciated by one of ordinary skill in the art, the antigen may be provided by injecting a polypeptide against which antibodies are desired to be raised into a recipient, or contacting the recipient with a nucleic acid capable of expressing the antigen and under conditions for expression of the antigen, leading to an immune response.

[0199] In a preferred embodiment the prostate cancer proteins against which antibodies are raised are secreted proteins as described above. Without being bound by theory, antibodies used for treatment, bind and prevent the secreted protein from binding to its receptor, thereby inactivating the secreted prostate cancer protein.

[0200] In another preferred embodiment, the prostate cancer protein to which antibodies are raised is a transmembrane protein. Without being bound by theory, antibodies used for treatment, bind the extracellular domain of the prostate cancer protein and prevent it from binding to other proteins, such as circulating ligands or cell-associated molecules. The antibody may cause down-regulation of the transmembrane prostate cancer protein. As will be appreciated by one of ordinary skill in the art, the antibody may be a competitive, non-competitive or uncompetitive inhibitor of protein binding to the extracellular domain of the prostate cancer protein. The antibody is also an antagonist of the prostate cancer protein. Further, the antibody prevents activation of the transmembrane prostate cancer protein. In one aspect, when the antibody prevents the binding of other molecules to the prostate cancer protein, the antibody prevents growth of the cell. The antibody may also be used to target or sensitize the cell to cytotoxic agents, including, but not limited to TNF-α, TNF-β, IL-1, INF-γ and IL-2, or chemotherapeutic agents including 5FU, vinblastine, actinomycin D, cisplatin, methotrexate, and the like. In some instances the antibody belongs to a sub-type that activates serum complement when complexed with the transmembrane protein thereby mediating cytotoxicity or antigen-dependent cytotoxicity (ADCC). Thus, prostate cancer is treated by administering to a patient antibodies directed against the transmembrane prostate cancer protein. Antibody-labeling may activate a co-toxin, localize a toxin payload, or otherwise provide means to locally ablate cells.

[0201] In another preferred embodiment, the antibody is conjugated to an effector moiety. The effector moiety can be any number of molecules, including labelling moieties such as radioactive labels or fluorescent labels, or can be a therapeutic moiety. In one aspect the therapeutic moiety is a small molecule that modulates the activity of the prostate cancer protein. In another aspect the therapeutic moiety modulates the activity of molecules associated with or in close proximity to the prostate cancer protein. The therapeutic moiety may inhibit enzymatic activity such as protease or collagenase or protein kinase activity associated with prostate cancer.

[0202] In a preferred embodiment, the therapeutic moiety can also be a cytotoxic agent. In this method, targeting the cytotoxic agent to prostate cancer tissue or cells, results in a reduction in the number of afflicted cells, thereby reducing symptoms associated with prostate cancer. Cytotoxic agents are numerous and varied and include, but are not limited to, cytotoxic drugs or toxins or active fragments of such toxins. Suitable toxins and their corresponding fragments include diphtheria A chain, exotoxin A chain, ricin A chain, abrin A chain, curcin, crotin, phenomycin, enomycin and the like. Cytotoxic agents also include radiochemicals made by conjugating radioisotopes to antibodies raised against prostate cancer proteins, or binding of a radionuclide to a chelating agent that has been covalently attached to the antibody. Targeting the therapeutic moiety to transmembrane prostate cancer proteins not only serves to increase the local concentration of therapeutic moiety in the prostate cancer afflicted area, but also serves to reduce deleterious side effects that may be associated with the therapeutic moiety.

[0203] In another preferred embodiment, the prostate cancer protein against which the antibodies are raised is an intracellular protein. In this case, the antibody may be conjugated to a protein which facilitates entry into the cell. In one case, the antibody enters the cell by endocytosis. In another embodiment, a nucleic acid encoding the antibody is administered to the individual or cell. Moreover, wherein the prostate cancer protein can be targeted within a cell, i.e., the nucleus, an antibody thereto contains a signal for that target localization, i.e., a nuclear localization signal.

[0204] The prostate cancer antibodies of the invention specifically bind to prostate cancer proteins. By “specifically bind” herein is meant that the antibodies bind, to the protein with a K_{d} of at least about 0.1 mM, more usually at least about 1 μM, preferably at least about 0.1 μM or better, and most preferably, 0.01 μM or better. Selectivity of binding is also important.

### Detection of Prostate Cancer Sequence for Diagnostic and Therapeutic Applications

[0205] In one aspect, the RNA expression levels of genes are determined for different cellular states in the prostate cancer phenotype. Expression levels of genes in normal tissue (i.e., not undergoing prostate cancer) and in prostate cancer tissue (and in some cases, for varying severities of prostate cancer that relate to prognosis, as outlined below) are evaluated to provide expression profiles. An expression profile of a particular cell state or point of development is essentially a “fingerprint” of the state. While two states may have any particular gene similarly expressed, the evaluation of a number of genes simultaneously allows the generation of a gene expression profile that is reflective of the state of the cell. By comparing expression profiles of cells in different states, information regarding which genes are important (including both up- and down-regulation of genes) in each of these states is obtained. Then, diagnosis may be performed or confirmed to determine whether a tissue sample has the gene expression profile of normal or cancerous tissue. This will provide for molecular diagnosis of related conditions.

[0206] “Differential expression,” or grammatical equivalents as used herein, refers to qualitative or quantitative differences in the temporal and/or cellular gene expression patterns within and among cells and tissue. Thus, a differentially expressed gene can qualitatively have its expression altered, including an activation or inactivation, in, e.g., normal versus prostate cancer tissue. Genes may be turned on or turned off in a particular state, relative to another state thus permitting comparison of two or more states. A qualitatively regulated gene will exhibit an expression pattern within a state or cell type which is detectable by standard techniques. Some genes will be expressed in one state or cell type, but not in both. Alternatively, the difference in expression may be quantitative, e.g., in that expression is increased or decreased; i.e., gene expression is either upregulated, resulting in an increased amount of transcript, or downregulated, resulting in a decreased amount of transcript. The degree to which expression differs need only be large enough to quantify via standard characterization techniques as outlined below, such as by use of Affymetrix GeneChip™ expression arrays, Lockhart, Nature Biotechnology 14:1675-1680 (1996), hereby expressly incorporated by reference. Other techniques include, but are not limited to, quantitative reverse transcriptase PCR, northern analysis and RNase protection. As outlined above, preferably the change in expression (i.e., upregulation or downregulation) is at least about 50%, more preferably at least about 100%, more preferably at least about 150%, more preferably at least about 200%, with from 300 to at least 1000% being especially preferred.

[0207] Evaluation may be at the gene transcript, or the protein level. The amount of gene expression may be monitored using nucleic acid probes to the DNA or RNA equivalent of the gene transcript, and the quantification of gene expression levels, or, alternatively, the final gene product itself (protein) can be monitored, e.g., with antibodies to the prostate cancer protein and standard immunoassays (ELISAs, etc.) or other techniques, including mass spectroscopy assays, 2D gel electrophoresis assays, etc. Proteins corresponding to prostate cancer genes, i.e., those identified as being important in a prostate cancer phenotype, can be evaluated in a prostate cancer diagnostic test.

[0208] In a preferred embodiment, gene expression monitoring is performed simultaneously on a number of genes. Multiple protein expression monitoring can be performed as well. Similarly, these assays may be performed on an individual basis as well.

[0209] In this embodiment, the prostate cancer nucleic acid probes are attached to biochips as outlined herein for the detection and quantification of prostate cancer sequences in a particular cell. The assays are further described below in the example. PCR techniques can be used to provide greater sensitivity.

[0210] In a preferred embodiment nucleic acids encoding the prostate cancer protein are detected. Although DNA or RNA encoding the prostate cancer protein may be detected, of particular interest are methods wherein an mRNA encoding a prostate cancer protein is detected. Probes to detect mRNA can be a nucleotide/deoxynucleotide probe that is complementary to and hybridizes with the mRNA and includes, but is not limited to, oligonucleotides, cDNA or RNA. Probes also should contain a detectable label, as defined herein. In one method the mRNA is detected after immobilizing the nucleic acid to be examined on a solid support such as nylon membranes and hybridizing the probe with the sample. Following washing to remove the non-specifically bound probe, the label is detected. In another method detection of the mRNA is performed in situ. In this method permeabilized cells or tissue samples are contacted with a detectably labeled nucleic acid probe for sufficient time to allow the probe to hybridize with the target mRNA. Following washing to remove the non-specifically bound probe, the label is detected. For example a digoxygenin labeled riboprobe (RNA probe) that is complementary to the mRNA encoding a prostate cancer protein is detected by binding the digoxygenin with an anti-digoxygenin secondary antibody and developed with nitro blue tetrazolium and 5-bromo-4-chloro-3-indoyl phosphate.

[0211] In a preferred embodiment, various proteins from the three classes of proteins as described herein (secreted, transmembrane or intracellular proteins) are used in diagnostic assays. The prostate cancer proteins, antibodies, nucleic acids, modified proteins and cells containing prostate cancer sequences are used in diagnostic assays. This can be performed on an individual gene or corresponding polypeptide level. In a preferred embodiment, the expression profiles are used, preferably in conjunction with high throughput screening techniques to allow monitoring for expression profile genes and/or corresponding polypeptides.

[0212] As described and defined herein, prostate cancer proteins, including intracellular, transmembrane or secreted proteins, find use as markers of prostate cancer. Detection of these proteins in putative prostate cancer tissue allows for detection or diagnosis of prostate cancer. In one embodiment, antibodies are used to detect prostate cancer proteins. A preferred method separates proteins from a sample by electrophoresis on a gel (typically a denaturing and reducing protein gel, but may be another type of gel, including isoelectric focusing gels and the like). Following separation of proteins, the prostate cancer protein is detected, e.g., by immunoblotting with antibodies raised against the prostate cancer protein. Methods of immunoblotting are well known to those of ordinary skill in the art.

[0213] In another preferred method, antibodies to the prostate cancer protein find use in in situ imaging techniques, e.g., in histology (e.g., Methods in Cell Biology: Antibodies in Cell Biology, volume 37 (Asai, ed. 1993)). In this method cells are contacted with from one to many antibodies to the prostate cancer protein(s). Following washing to remove non-specific antibody binding, the presence of the antibody or antibodies is detected. In one embodiment the antibody is detected by incubating with a secondary antibody that contains a detectable label. In another method the primary antibody to the prostate cancer protein(s) contains a detectable label, e.g. an enzyme marker that can act on a substrate. In another preferred embodiment each one of multiple primary antibodies contains a distinct and detectable label. This method finds particular use in simultaneous screening for a plurality of prostate cancer proteins. As will be appreciated by one of ordinary skill in the art, many other histological imaging techniques are also provided by the invention.

[0214] In a preferred embodiment the label is detected in a fluorometer which has the ability to detect and distinguish emissions of different wavelengths. In addition, a fluorescence activated cell sorter (FACS) can be used in the method.

[0215] In another preferred embodiment, antibodies find use in diagnosing prostate cancer from blood, serum, plasma, stool, and other samples. Such samples, therefore, are useful as samples to be probed or tested for the presence of prostate cancer proteins. Antibodies can be used to detect a prostate cancer protein by previously described immunoassay techniques including ELISA, immunoblotting (western blotting), immunoprecipitation, BIACORE technology and the like. Conversely, the presence of antibodies may indicate an immune response against an endogenous prostate cancer protein.

[0216] In a preferred embodiment, in situ hybridization of labeled prostate cancer nucleic acid probes to tissue arrays is done. For example, arrays of tissue samples, including prostate cancer tissue and/or normal tissue, are made. In situ hybridization (see, e.g., Ausubel, supra) is then performed. When comparing the fingerprints between an individual and a standard, the skilled artisan can make a diagnosis, a prognosis, or a prediction based on the findings. It is further understood that the genes which indicate the diagnosis may differ from those which indicate the prognosis and molecular profiling of the condition of the cells may lead to distinctions between responsive or refractory conditions or may be predictive of outcomes.

[0217] In a preferred embodiment, the prostate cancer proteins, antibodies, nucleic acids, modified proteins and cells containing prostate cancer sequences are used in prognosis assays. As above, gene expression profiles can be generated that correlate to prostate cancer, in terms of long term prognosis. Again, this may be done on either a protein or gene level, with the use of genes being preferred. As above, prostate cancer probes may be attached to biochips for the detection and quantification of prostate cancer sequences in a tissue or patient. The assays proceed as outlined above for diagnosis. PCR method may provide more sensitive and accurate quantification.

### Assays for Therapeutic Compounds

[0218] In a preferred embodiment members of the proteins, nucleic acids, and antibodies as described herein are used in drug screening assays. The prostate cancer proteins, antibodies, nucleic acids, modified proteins and cells containing prostate cancer sequences are used in drug screening assays or by evaluating the effect of drug candidates on a “gene expression profile” or expression profile of polypeptides. In a preferred embodiment, the expression profiles are used, preferably in conjunction with high throughput screening techniques to allow monitoring for expression profile genes after treatment with a candidate agent (e.g., Zlokarnik, et al., Science 279:84-8 (1998); Heid, Genome Res 6:986-94, 1996).

[0219] In a preferred embodiment, the prostate cancer proteins, antibodies, nucleic acids, modified proteins and cells containing the native or modified prostate cancer proteins are used in screening assays. That is, the present invention provides novel methods for screening for compositions which modulate the prostate cancer phenotype or an identified physiological function of a prostate cancer protein. As above, this can be done on an individual gene level or by evaluating the effect of drug candidates on a “gene expression profile”. In a preferred embodiment, the expression profiles are used, preferably in conjunction with high throughput screening techniques to allow monitoring for expression profile genes after treatment with a candidate agent, see Zlokarnik, supra.

[0220] Having identified the differentially expressed genes herein, a variety of assays may be executed. In a preferred embodiment, assays may be run on an individual gene or protein level. That is, having identified a particular gene as up regulated in prostate cancer, test compounds can be screened for the ability to modulate gene expression or for binding to the prostate cancer protein. “Modulation” thus includes both an increase and a decrease in gene expression. The preferred amount of modulation will depend on the original change of the gene expression in normal versus tissue undergoing prostate cancer, with changes of at least 10%, preferably 50%, more preferably 100-300%, and in some embodiments 300-1000% or greater. Thus, if a gene exhibits a 4-fold increase in prostate cancer tissue compared to normal tissue, a decrease of about four-fold is often desired; similarly, a 10-fold decrease in prostate cancer tissue compared to normal tissue often provides a target value of a 10-fold increase in expression to be induced by the test compound.

[0221] The amount of gene expression may be monitored using nucleic acid probes and the quantification of gene expression levels, or, alternatively, the gene product itself can be monitored, e.g., through the use of antibodies to the prostate cancer protein and standard immunoassays. Proteomics and separation techniques may also allow quantification of expression.

[0222] In a preferred embodiment, gene expression or protein monitoring of a number of entities, i.e., an expression profile, is monitored simultaneously. Such profiles will typically involve a plurality of those entities described herein.

[0223] In this embodiment, the prostate cancer nucleic acid probes are attached to biochips as outlined herein for the detection and quantification of prostate cancer sequences in a particular cell. Alternatively, PCR may be used. Thus, a series, e.g., of microtiter plate, may be used with dispensed primers in desired wells. A PCR reaction can then be performed and analyzed for each well.

[0224] Expression monitoring can be performed to identify compounds that modify the expression of one or more prostate cancer-associated sequences, e.g., a polynucleotide sequence set out in Tables 1-16. Generally, in a preferred embodiment, a test modulator is added to the cells prior to analysis. Moreover, screens are also provided to identify agents that modulate prostate cancer, modulate prostate cancer proteins, bind to a prostate cancer protein, or interfere with the binding of a prostate cancer protein and an antibody or other binding partner.

[0225] The term “test compound” or “drug candidate” or “modulator” or grammatical equivalents as used herein describes any molecule, e.g., protein, oligopeptide, small organic molecule, polysaccharide, polynucleotide, etc., to be tested for the capacity to directly or indirectly alter the prostate cancer phenotype or the expression of a prostate cancer sequence, e.g., a nucleic acid or protein sequence. In preferred embodiments, modulators alter expression profiles, or expression profile nucleic acids or proteins provided herein. In one embodiment, the modulator suppresses a prostate cancer phenotype, e.g. to a normal tissue fingerprint. In another embodiment, a modulator induced a prostate cancer phenotype. Generally, a plurality of assay mixtures are run in parallel with different agent concentrations to obtain a differential response to the various concentrations. Typically, one of these concentrations serves as a negative control, i.e., at zero concentration or below the level of detection.

[0226] Drug candidates encompass numerous chemical classes, though typically they are organic molecules, preferably small organic compounds having a molecular weight of more than 100 and less than about 2,500 daltons. Preferred small molecules are less than 2000, or less than 1500 or less than 1000 or less than 500 D. Candidate agents comprise functional groups necessary for structural interaction with proteins, particularly hydrogen bonding, and typically include at least an amine, carbonyl, hydroxyl or carboxyl group, preferably at least two of the functional chemical groups. The candidate agents often comprise cyclical carbon or heterocyclic structures and/or aromatic or polyaromatic structures substituted with one or more of the above functional groups. Candidate agents are also found among biomolecules including peptides, saccharides, fatty acids, steroids, purines, pyrimidines, derivatives, structural analogs or combinations thereof. Particularly preferred are peptides.

[0227] In one aspect, a modulator will neutralize the effect of a prostate cancer protein. By “neutralize” is meant that activity of a protein is inhibited or blocked and the consequent effect on the cell.

[0228] In certain embodiments, combinatorial libraries of potential modulators will be screened for an ability to bind to a prostate cancer polypeptide or to modulate activity. Conventionally, new chemical entities with useful properties are generated by identifying a chemical compound (called a “lead compound”) with some desirable property or activity, e.g., inhibiting activity, creating variants of the lead compound, and evaluating the property and activity of those variant compounds. Often, high throughput screening (HTS) methods are employed for such an analysis.

[0229] In one preferred embodiment, high throughput screening methods involve providing a library containing a large number of potential therapeutic compounds (candidate compounds). Such “combinatorial chemical libraries” are then screened in one or more assays to identify those library members (particular chemical species or subclasses) that display a desired characteristic activity. The compounds thus identified can serve as conventional “lead compounds” or can themselves be used as potential or actual therapeutics.

[0230] A combinatorial chemical library is a collection of diverse chemical compounds generated by either chemical synthesis or biological synthesis by combining a number of chemical “building blocks” such as reagents. For example, a linear combinatorial chemical library, such as a polypeptide (e.g., mutein) library, is formed by combining a set of chemical building blocks called amino acids in every possible way for a given compound length (i.e., the number of amino acids in a polypeptide compound). Millions of chemical compounds can be synthesized through such combinatorial mixing of chemical building blocks (Gallop et al., J. Med. Chem. 37(9):1233-1251 (1994)).

[0231] Preparation and screening of combinatorial chemical libraries is well known to those of skill in the art. Such combinatorial chemical libraries include, but are not limited to, peptide libraries (see, e.g., U.S. Pat. No. 5,010,175, Furka, Pept. Prot. Res. 37:487-493 (1991), Houghton et al., Nature, 354:84-88 (1991)), peptoids (PCT Publication No WO 91/19735), encoded peptides (PCT Publication WO 93/20242), random bio-oligomers (PCT Publication WO 92/00091), benzodiazepines (U.S. Pat. No. 5,288,514), diversomers such as hydantoins, benzodiazepines and dipeptides (Hobbs et al., Proc. Nat. Acad. Sci. USA 90:6909-6913 (1993)), vinylogous polypeptides (Hagihara et al., J. Amer. Chem. Soc. 114:6568 (1992)), nonpeptidal peptidomimetics with a Beta-D-Glucose scaffolding (Hirschmann et al., J. Amer. Chem. Soc. 114:9217-9218 (1992)), analogous organic syntheses of small compound libraries (Chen et al., J. Amer. Chem. Soc. 116:2661 (1994)), oligocarbamates (Cho, et al., Science 261:1303 (1993)), and/or peptidyl phosphonates (Campbell et al., J. Org. Chem. 59:658 (1994)). See, generally, Gordon et al., J. Med. Chem. 37:1385 (1994), nucleic acid libraries (see, e.g., Strategene, Corp.), peptide nucleic acid libraries (see, e.g., U.S. Pat. No. 5,539,083), antibody libraries (see, e.g., Vaughn et al., Nature Biotechnology 14(3):309-314 (1996), and PCT/US96/10287), carbohydrate libraries (see, e.g., Liang et al., Science 274:1520-1522 (1996), and U.S. Pat. No. 5,593,853), and small organic molecule libraries (see, e.g., benzodiazepines, Baum, C&EN, January 18, page 33 (1993); isoprenoids, U.S. Pat. No. 5,569,588; thiazolidinones and metathiazanones, U.S. Pat. No. 5,549,974; pyrrolidines, U.S. Pat. Nos. 5,525,735 and 5,519,134; morpholino compounds, U.S. Pat. No. 5,506,337; benzodiazepines, U.S. Pat. No. 5,288,514; and the like).

[0232] Devices for the preparation of combinatorial libraries are commercially available (see, e.g., 357 MPS, 390 MPS, Advanced Chem Tech, Louisville Ky., Symphony, Rainin, Woburn, Mass., 433A Applied Biosystems, Foster City, Calif., 9050 Plus, Millipore, Bedford, Mass.).

[0233] A number of well known robotic systems have also been developed for solution phase chemistries. These systems include automated workstations like the automated synthesis apparatus developed by Takeda Chemical Industries, LTD. (Osaka, Japan) and many robotic systems utilizing robotic arms (Zymate II, Zymark Corporation, Hopkinton, Mass.; Orca, Hewlett-Packard, Palo Alto, Calif.), which mimic the manual synthetic operations performed by a chemist. Any of the above devices are suitable for use with the present invention. The nature and implementation of modifications to these devices (if any) so that they can operate as discussed herein will be apparent to persons skilled in the relevant art. In addition, numerous combinatorial libraries are themselves commercially available (see, e.g., ComGenex, Princeton, N.J., Asinex, Moscow, Ru, Tripos, Inc., St. Louis, Mo., ChemStar, Ltd, Moscow, RU, 3D Pharmaceuticals, Exton, Pa., Martek Biosciences, Columbia, Md., etc.).

[0234] The assays to identify modulators are amenable to high throughput screening. Preferred assays thus detect enhancement or inhibition of prostate cancer gene transcription, inhibition or enhancement of polypeptide expression, and inhibition or enhancement of polypeptide activity.

[0235] High throughput assays for the presence, absence, quantification, or other properties of particular nucleic acids or protein products are well known to those of skill in the art. Similarly, binding assays and reporter gene assays are similarly well known. Thus, e.g., U.S. Pat. No. 5,559,410 discloses high throughput screening methods for proteins, U.S. Pat. No. 5,585,639 discloses high throughput screening methods for nucleic acid binding (i.e., in arrays), while U.S. Pat. Nos. 5,576,220 and 5,541,061 disclose high throughput methods of screening for ligand/antibody binding.

[0236] In addition, high throughput screening systems are commercially available (see, e.g., Zymark Corp., Hopkinton, Mass.; Air Technical Industries, Mentor, Ohio; Beckman Instruments, Inc. Fullerton, Calif.; Precision Systems, Inc., Natick, Mass., etc.). These systems typically automate entire procedures, including all sample and reagent pipetting, liquid dispensing, timed incubations, and final readings of the microplate in detector(s) appropriate for the assay. These configurable systems provide high throughput and rapid start up as well as a high degree of flexibility and customization. The manufacturers of such systems provide detailed protocols for various high throughput systems. Thus, e.g., Zymark Corp. provides technical bulletins describing screening systems for detecting the modulation of gene transcription, ligand binding, and the like.

[0237] In one embodiment, modulators are proteins, often naturally occurring proteins or fragments of naturally occurring proteins. Thus, e.g., cellular extracts containing proteins, or random or directed digests of proteinaceous cellular extracts, may be used. In this way libraries of proteins may be made for screening in the methods of the invention. Particularly preferred in this embodiment are libraries of bacterial, fungal, viral, and mammalian proteins, with the latter being preferred, and human proteins being especially preferred. Particularly useful test compound will be directed to the class of proteins to which the target belongs, e.g., substrates for enzymes or ligands and receptors.

[0238] In a preferred embodiment, modulators are peptides of from about 5 to about 30 amino acids, with from about 5 to about 20 amino acids being preferred, and from about 7 to about 15 being particularly preferred. The peptides may be digests of naturally occurring proteins as is outlined above, random peptides, or “biased” random peptides. By “randomized” or grammatical equivalents herein is meant that each nucleic acid and peptide consists of essentially random nucleotides and amino acids, respectively. Since generally these random peptides (or nucleic acids, discussed below) are chemically synthesized, they may incorporate any nucleotide or amino acid at any position. The synthetic process can be designed to generate randomized proteins or nucleic acids, to allow the formation of all or most of the possible combinations over the length of the sequence, thus forming a library of randomized candidate bioactive proteinaceous agents.

[0239] In one embodiment, the library is fully randomized, with no sequence preferences or constants at any position. In a preferred embodiment, the library is biased. That is, some positions within the sequence are either held constant, or are selected from a limited number of possibilities. For example, in a preferred embodiment, the nucleotides or amino acid residues are randomized within a defined class, e.g., of hydrophobic amino acids, hydrophilic residues, sterically biased (either small or large) residues, towards the creation of nucleic acid binding domains, the creation of cysteines, for cross-linking, prolines for SH-3 domains, serines, threonines, tyrosines or histidines for phosphorylation sites, etc., or to purines, etc.

[0240] Modulators of prostate cancer can also be nucleic acids, as defined below. As described above generally for proteins, nucleic acid modulating agents may be naturally occurring nucleic acids, random nucleic acids, or “biased” random nucleic acids. For example, digests of procaryotic or eucaryotic genomes may be used as is outlined above for proteins.

[0241] In certain embodiments, the activity of a prostate cancer-associated protein is down-regulated, or entirely inhibited, by the use of antisense polynucleotide, i.e., a nucleic acid complementary to, and which can preferably hybridize specifically to, a coding mRNA nucleic acid sequence, e.g., a prostate cancer protein mRNA, or a subsequence thereof. Binding of the antisense polynucleotide to the mRNA reduces the translation and/or stability of the mRNA.

[0242] In the context of this invention, antisense polynucleotides can comprise naturally-occurring nucleotides, or synthetic species formed from naturally-occurring subunits or their close homologs. Antisense polynucleotides may also have altered sugar moieties or inter-sugar linkages. Exemplary among these are the phosphorothioate and other sulfur containing species which are known for use in the art. Analogs are comprehended by this invention so long as they function effectively to hybridize with the prostate cancer protein mRNA. See, e.g., Isis Pharmaceuticals, Carlsbad, Calif.; Sequitor, Inc., Natick, Mass.

[0243] Such antisense polynucleotides can readily be synthesized using recombinant means, or can be synthesized in vitro. Equipment for such synthesis is sold by several vendors, including Applied Biosystems. The preparation of other oligonucleotides such as phosphorothioates and alkylated derivatives is also well known to those of skill in the art.

[0244] Antisense molecules as used herein include antisense or sense oligonucleotides. Sense oligonucleotides can, e.g., be employed to block transcription by binding to the anti-sense strand. The antisense and sense oligonucleotide comprise a single-stranded nucleic acid sequence (either RNA or DNA) capable of binding to target mRNA (sense) or DNA (antisense) sequences for prostate cancer molecules. Antisense or sense oligonucleotides, according to the present invention, comprise a fragment generally at least about 14 nucleotides, preferably from about 14 to 30 nucleotides. The ability to derive an antisense or a sense oligonucleotide, based upon a cDNA sequence encoding a given protein is described in, e.g., Stein & Cohen (Cancer Res. 48:2659 (1988 and van der Krol et al. (BioTechniques 6:958 (1988)).

[0245] In addition to antisense polynucleotides, ribozymes can be used to target and inhibit transcription of prostate cancer-associated nucleotide sequences. A ribozyme is an RNA molecule that catalytically cleaves other RNA molecules. Different kinds of ribozymes have been described, including group I ribozymes, hammerhead ribozymes, hairpin ribozymes, RNase P, and axhead ribozymes (see, e.g., Castanotto et al., Adv. in Pharmacology 25: 289-317 (1994) for a general review of the properties of different ribozymes).

[0246] The general features of hairpin ribozymes are described, e.g., in Hampel et al., Nucl. Acids Res. 18:299-304 (1990); European Patent Publication No. 0 360 257; U.S. Pat. No. 5,254,678. Methods of preparing are well known to those of skill in the art (see, e.g., WO 94/26877; Ojwang et al., Proc. Natl. Acad. Sci. USA 90:6340-6344 (1993); Yamada et al., Human Gene Therapy 1:39-45 (1994); Leavitt et al., Proc. Natl. Acad. Sci. USA 92:699-703 (1995); Leavitt et al., Human Gene Therapy 5:1151-120 (1994); and Yamada et al, Virology 205: 121-126 (1994)).

[0247] Polynucleotide modulators of prostate cancer may be introduced into a cell containing the target nucleotide sequence by formation of a conjugate with a ligand binding molecule, as described in WO 91/04753. Suitable ligand binding molecules include, but are not limited to, cell surface receptors, growth factors, other cytokines, or other ligands that bind to cell surface receptors. Preferably, conjugation of the ligand binding molecule does not substantially interfere with the ability of the ligand binding molecule to bind to its corresponding molecule or receptor, or block entry of the sense or antisense oligonucleotide or its conjugated version into the cell. Alternatively, a polynucleotide modulator of prostate cancer may be introduced into a cell containing the target nucleic acid sequence, e.g., by formation of an polynucleotide-lipid complex, as described in WO 90/10448. It is understood that the use of antisense molecules or knock out and knock in models may also be used in screening assays as discussed above, in addition to methods of treatment.

[0248] As noted above, gene expression monitoring is conveniently used to test candidate modultors (e.g., protein, nucleic acid or small molecule). After the candidate agent has been added and the cells allowed to incubate for some period of time, the sample containing a target sequence to be analyzed is added to the biochip. If required, the target sequence is prepared using known techniques. For example, the sample may be treated to lyse the cells, using known lysis buffers, electroporation, etc., with purification and/or amplification such as PCR performed as appropriate. For example, an in vitro transcription with labels covalently attached to the nucleotides is performed. Generally, the nucleic acids are labeled with biotin-FITC or PE, or with cy3 or cy5.

[0249] In a preferred embodiment, the target sequence is labeled with, e.g., a fluorescent, a chemiluminescent, a chemical, or a radioactive signal, to provide a means of detecting the target sequence's specific binding to a probe. The label also can be an enzyme, such as, alkaline phosphatase or horseradish peroxidase, which when provided with an appropriate substrate produces a product that can be detected. Alternatively, the label can be a labeled compound or small molecule, such as an enzyme inhibitor, that binds but is not catalyzed or altered by the enzyme. The label also can be a moiety or compound, such as, an epitope tag or biotin which specifically binds to streptavidin. For the example of biotin, the streptavidin is labeled as described above, thereby, providing a detectable signal for the bound target sequence. Unbound labeled streptavidin is typically removed prior to analysis.

[0250] As will be appreciated by those in the art, these assays can be direct hybridization assays or can comprise “sandwich assays”, which include the use of multiple probes, as is generally outlined in U.S. Pat. Nos. 5,681,702, 5,597,909, 5,545,730, 5,594,117, 5,591,584, 5,571,670, 5,580,731, 5,571,670, 5,591,584, 5,624,802, 5,635,352, 5,594,118, 5,359,100, 5,124,246 and 5,681,697, all of which are hereby incorporated by reference. In this embodiment, in general, the target nucleic acid is prepared as outlined above, and then added to the biochip comprising a plurality of nucleic acid probes, under conditions that allow the formation of a hybridization complex.

[0251] A variety of hybridization conditions may be used in the present invention, including high, moderate and low stringency conditions as outlined above. The assays are generally run under stringency conditions which allows formation of the label probe hybridization complex only in the presence of target. Stringency can be controlled by altering a step parameter that is a thermodynamic variable, including, but not limited to, temperature, formamide concentration, salt concentration, chaotropic salt concentration pH, organic solvent concentration, etc.

[0252] These parameters may also be used to control non-specific binding, as is generally outlined in U.S. Pat. No. 5,681,697. Thus it may be desirable to perform certain steps at higher stringency conditions to reduce non-specific binding.

[0253] The reactions outlined herein may be accomplished in a variety of ways. Components of the reaction may be added simultaneously, or sequentially, in different orders, with preferred embodiments outlined below. In addition, the reaction may include a variety of other reagents. These include salts, buffers, neutral proteins, e.g. albumin, detergents, etc. which may be used to facilitate optimal hybridization and detection, and/or reduce non-specific or background interactions. Reagents that otherwise improve the efficiency of the assay, such as protease inhibitors, nuclease inhibitors, anti-microbial agents, etc., may also be used as appropriate, depending on the sample preparation methods and purity of the target.

[0254] The assay data are analyzed to determine the expression levels, and changes in expression levels as between states, of individual genes, forming a gene expression profile.

[0255] Screens are performed to identify modulators of the prostate cancer phenotype. In one embodiment, screening is performed to identify modulators that can induce or suppress a particular expression profile, thus preferably generating the associated phenotype. In another embodiment, e.g., for diagnostic applications, having identified differentially expressed genes important in a particular state, screens can be performed to identify modulators that alter expression of individual genes. In an another embodiment, screening is performed to identify modulators that alter a biological function of the expression product of a differentially expressed gene. Again, having identified the importance of a gene in a particular state, screens are performed to identify agents that bind and/or modulate the biological activity of the gene product.

[0256] In addition screens can be done for genes that are induced in response to a candidate agent. After identifying a modulator based upon its ability to suppress a prostate cancer expression pattern leading to a normal expression pattern, or to modulate a single prostate cancer gene expression profile so as to mimic the expression of the gene from normal tissue, a screen as described above can be performed to identify genes that are specifically modulated in response to the agent. Comparing expression profiles between normal tissue and agent treated prostate cancer tissue reveals genes that are not expressed in normal tissue or prostate cancer tissue, but are expressed in agent treated tissue. These agent-specific sequences can be identified and used by methods described herein for prostate cancer genes or proteins. In particular these sequences and the proteins they encode find use in marking or identifying agent treated cells. In addition, antibodies can be raised against the agent induced proteins and used to target novel therapeutics to the treated prostate cancer tissue sample.

[0257] Thus, in one embodiment, a test compound is administered to a population of prostate cancer cells, that have an associated prostate cancer expression profile. By “administration” or “contacting” herein is meant that the candidate agent is added to the cells in such a manner as to allow the agent to act upon the cell, whether by uptake and intracellular action, or by action at the cell surface. In some embodiments, nucleic acid encoding a proteinaceous candidate agent (i.e., a peptide) may be put into a viral construct such as an adenoviral or retroviral construct, and added to the cell, such that expression of the peptide agent is accomplished, e.g., PCT US97/01019. Regulatable gene therapy systems can also be used.

[0258] Once the test compound has been administered to the cells, the cells can be washed if desired and are allowed to incubate under preferably physiological conditions for some period of time. The cells are then harvested and a new gene expression profile is generated, as outlined herein.

[0259] Thus, e.g., prostate cancer tissue may be screened for agents that modulate, e.g., induce or suppress the prostate cancer phenotype. A change in at least one gene, preferably many, of the expression profile indicates that the agent has an effect on prostate cancer activity. By defining such a signature for the prostate cancer phenotype, screens for new drugs that alter the phenotype can be devised. With this approach, the drug target need not be known and need not be represented in the original expression screening platform, nor does the level of transcript for the target protein need to change.

[0260] In a preferred embodiment, as outlined above, screens may be done on individual genes and gene products (proteins). That is, having identified a particular differentially expressed gene as important in a particular state, screening of modulators of either the expression of the gene or the gene product itself can be done. The gene products of differentially expressed genes are sometimes referred to herein as “prostate cancer proteins” or a “prostate cancer modulatory protein”. The prostate cancer modulatory protein may be a fragment, or alternatively, be the full length protein to the fragment encoded by the nucleic acids of Tables 1-16. Preferably, the prostate cancer modulatory protein is a fragment. In a preferred embodiment, the prostate cancer amino acid sequence which is used to determine sequence identity or similarity is encoded by a nucleic acid of Tables 1-16. In another embodiment, the sequences are naturally occurring allelic variants of a protein encoded by a nucleic acid of Tables 1-16. In another embodiment, the sequences are sequence variants as further described herein.

[0261] Preferably, the prostate cancer modulatory protein is a fragment of approximately 14 to 24 amino acids long. More preferably the fragment is a soluble fragment. Preferably, the fragment includes a non-transmembrane region. In a preferred embodiment, the fragment has an N-terminal Cys to aid in solubility. In one embodiment, the C-terminus of the fragment is kept as a free acid and the N-terminus is a free amine to aid in coupling, i.e., to cysteine.

[0262] In one embodiment the prostate cancer proteins are conjugated to an immunogenic agent as discussed herein. In one embodiment the prostate cancer protein is conjugated to BSA.

[0263] Measurements of prostate cancer polypeptide activity, or of prostate cancer or the prostate cancer phenotype can be performed using a variety of assays. For example, the effects of the test compounds upon the function of the prostate cancer polypeptides can be measured by examining parameters described above. A suitable physiological change that affects activity can be used to assess the influence of a test compound on the polypeptides of this invention. When the functional consequences are determined using intact cells or animals, one can also measure a variety of effects such as, in the case of prostate cancer associated with tumors, tumor growth, tumor metastasis, neovascularization, hormone release, transcriptional changes to both known and uncharacterized genetic markers (e.g., northern blots), changes in cell metabolism such as cell growth or pH changes, and changes in intracellular second messengers such as cGMP. In the assays of the invention, mammalian prostate cancer polypeptide is typically used, e.g., mouse, preferably human.

[0264] Assays to identify compounds with modulating activity can be performed in vitro. For example, a prostate cancer polypeptide is first contacted with a potential modulator and incubated for a suitable amount of time, e.g., from 0.5 to 48 hours. In one embodiment, the prostate cancer polypeptide levels are determined in vitro by measuring the level of protein or mRNA. The level of protein is measured using immunoassays such as western blotting, ELISA and the like with an antibody that selectively binds to the prostate cancer polypeptide or a fragment thereof. For measurement of mRNA, amplification, e.g., using PCR, LCR, or hybridization assays, e.g., northern hybridization, RNAse protection, dot blotting, are preferred. The level of protein or mRNA is detected using directly or indirectly labeled detection agents, e.g., fluorescently or radioactively labeled nucleic acids, radioactively or enzymatically labeled antibodies, and the like, as described herein.

[0265] Alternatively, a reporter gene system can be devised using the prostate cancer protein promoter operably linked to a reporter gene such as luciferase, green fluorescent protein, CAT, or β-gal. The reporter construct is typically transfected into a cell. After treatment with a potential modulator, the amount of reporter gene transcription, translation, or activity is measured according to standard techniques known to those of skill in the art.

[0266] In a preferred embodiment, as outlined above, screens may be done on individual genes and gene products (proteins). That is, having identified a particular differentially expressed gene as important in a particular state, screening of modulators of the expression of the gene or the gene product itself can be done. The gene products of differentially expressed genes are sometimes referred to herein as “prostate cancer proteins.” The prostate cancer protein may be a fragment, or alternatively, be the full length protein to a fragment shown herein.

[0267] In one embodiment, screening for modulators of expression of specific genes is performed. Typically, the expression of only one or a few genes are evaluated. In another embodiment, screens are designed to first find compounds that bind to differentially expressed proteins. These compounds are then evaluated for the ability to modulate differentially expressed activity. Moreover, once initial candidate compounds are identified, variants can be further screened to better evaluate structure activity relationships.

[0268] In a preferred embodiment, binding assays are done. In general, purified or isolated gene product is used; that is, the gene products of one or more differentially expressed nucleic acids are made. For example, antibodies are generated to the protein gene products, and standard immunoassays are run to determine the amount of protein present. Alternatively, cells comprising the prostate cancer proteins can be used in the assays.

[0269] Thus, in a preferred embodiment, the methods comprise combining a prostate cancer protein and a candidate compound, and determining the binding of the compound to the prostate cancer protein. Preferred embodiments utilize the human prostate cancer protein, although other mammalian proteins may also be used, e.g. for the development of animal models of human disease. In some embodiments, as outlined herein, variant or derivative prostate cancer proteins may be used.

[0270] Generally, in a preferred embodiment of the methods herein, the prostate cancer protein or the candidate agent is non-diffusably bound to an insoluble support having isolated sample receiving areas (e.g. a microtiter plate, an array, etc.). The insoluble supports may be made of any composition to which the compositions can be bound, is readily separated from soluble material, and is otherwise compatible with the overall method of screening. The surface of such supports may be solid or porous and of any convenient shape. Examples of suitable insoluble supports include microtiter plates, arrays, membranes and beads. These are typically made of glass, plastic (e.g., polystyrene), polysaccharides, nylon or nitrocellulose, Teflon™, etc. Microtiter plates and arrays are especially convenient because a large number of assays can be carried out simultaneously, using small amounts of reagents and samples. The particular manner of binding of the composition is not crucial so long as it is compatible with the reagents and overall methods of the invention, maintains the activity of the composition and is nondiffusable. Preferred methods of binding include the use of antibodies (which do not sterically block either the ligand binding site or activation sequence when the protein is bound to the support), direct binding to “sticky” or ionic supports, chemical crosslinking, the synthesis of the protein or agent on the surface, etc. Following binding of the protein or agent, excess unbound material is removed by washing. The sample receiving areas may then be blocked through incubation with bovine serum albumin (BSA), casein or other innocuous protein or other moiety.

[0271] In a preferred embodiment, the prostate cancer protein is bound to the support, and a test compound is added to the assay. Alternatively, the candidate agent is bound to the support and the prostate cancer protein is added. Novel binding agents include specific antibodies, non-natural binding agents identified in screens of chemical libraries, peptide analogs, etc. Of particular interest are screening assays for agents that have a low toxicity for human cells. A wide variety of assays may be used for this purpose, including labeled in vitro protein-protein binding assays, electrophoretic mobility shift assays, immunoassays for protein binding, functional assays (phosphorylation assays, etc.) and the like.

[0272] The determination of the binding of the test modulating compound to the prostate cancer protein may be done in a number of ways. In a preferred embodiment, the compound is labeled, and binding determined directly, e.g., by attaching all or a portion of the prostate cancer protein to a solid support, adding a labeled candidate agent (e.g., a fluorescent label), washing off excess reagent, and determining whether the label is present on the solid support. Various blocking and washing steps may be utilized as appropriate.

[0273] In some embodiments, only one of the components is labeled, e.g., the proteins (or proteinaceous candidate compounds) can be labeled. Alternatively, more than one component can be labeled with different labels, e.g., ¹²⁵I for the proteins and a fluorophor for the compound. Proximity reagents, e.g., quenching or energy transfer reagents are also useful.

[0274] In one embodiment, the binding of the test compound is determined by competitive binding assay. The competitor is a binding moiety known to bind to the target molecule (i.e., a prostate cancer protein), such as an antibody, peptide, binding partner, ligand, etc. Under certain circumstances, there may be competitive binding between the compound and the binding moiety, with the binding moiety displacing the compound. In one embodiment, the test compound is labeled. Either the compound, or the competitor, or both, is added first to the protein for a time sufficient to allow binding, if present. Incubations may be performed at a temperature which facilitates optimal activity, typically between 4 and 40° C. Incubation periods are typically optimized, e.g., to facilitate rapid high throughput screening. Typically between 0.1 and 1 hour will be sufficient. Excess reagent is generally removed or washed away. The second component is then added, and the presence or absence of the labeled component is followed, to indicate binding.

[0275] In a preferred embodiment, the competitor is added, first, followed by the test compound. Displacement of the competitor is an indication that the test compound is binding to the prostate cancer protein and thus is capable of binding to, and potentially modulating, the activity of the prostate cancer protein. In this embodiment, either component can be labeled. Thus, e.g., if the competitor is labeled, the presence of label in the wash solution indicates displacement by the agent. Alternatively, if the test compound is labeled, the presence of the label on the support indicates displacement.

[0276] In an alternative embodiment, the test compound is added first, with incubation and washing, followed by the competitor. The absence of binding by the competitor may indicate that the test compound is bound to the prostate cancer protein with a higher affinity. Thus, if the test compound is labeled, the presence of the label on the support, coupled with a lack of competitor binding, may indicate that the test compound is capable of binding to the prostate cancer protein.

[0277] In a preferred embodiment, the methods comprise differential screening to identity agents that are capable of modulating the activity of the prostate cancer proteins. In this embodiment, the methods comprise combining a prostate cancer protein and a competitor in a first sample. A second sample comprises a test compound, a prostate cancer protein, and a competitor. The binding of the competitor is determined for both samples, and a change, or difference in binding between the two samples indicates the presence of an agent capable of binding to the prostate cancer protein and potentially modulating its activity. That is, if the binding of the competitor is different in the second sample relative to the first sample, the agent is capable of binding to the prostate cancer protein.

[0278] Alternatively, differential screening is used to identify drug candidates that bind to the native prostate cancer protein, but cannot bind to modified prostate cancer proteins. The structure of the prostate cancer protein may be modeled, and used in rational drug design to synthesize agents that interact with that site. Drug candidates that affect the activity of a prostate cancer protein are also identified by screening drugs for the ability to either enhance or reduce the activity of the protein.

[0279] Positive controls and negative controls may be used in the assays. Preferably control and test samples are performed in at least triplicate to obtain statistically significant results. Incubation of all samples is for a time sufficient for the binding of the agent to the protein. Following incubation, samples are washed free of non-specifically bound material and the amount of bound, generally labeled agent determined. For example, where a radiolabel is employed, the samples may be counted in a scintillation counter to determine the amount of bound compound.

[0280] A variety of other reagents may be included in the screening assays. These include reagents like salts, neutral proteins, e.g. albumin, detergents, etc. which may be used to facilitate optimal protein-protein binding and/or reduce non-specific or background interactions. Also reagents that otherwise improve the efficiency of the assay, such as protease inhibitors, nuclease inhibitors, anti-microbial agents, etc., may be used. The mixture of components may be added in an order that provides for the requisite binding.

[0281] In a preferred embodiment, the invention provides methods for screening for a compound capable of modulating the activity of a prostate cancer protein. The methods comprise adding a test compound, as defined above, to a cell comprising prostate cancer proteins. Preferred cell types include almost any cell. The cells contain a recombinant nucleic acid that encodes a prostate cancer protein. In a preferred embodiment, a library of candidate agents are tested on a plurality of cells.

[0282] In one aspect, the assays are evaluated in the presence or absence or previous or subsequent exposure of physiological signals, e.g. hormones, antibodies, peptides, antigens, cytokines, growth factors, action potentials, pharmacological agents including chemotherapeutics, radiation, carcinogenics, or other cells (i.e. cell-cell contacts). In another example, the determinations are determined at different stages of the cell cycle process.

[0283] In this way, compounds that modulate prostate cancer agents are identified. Compounds with pharmacological activity are able to enhance or interfere with the activity of the prostate cancer protein. Once identified, similar structures are evaluated to identify critical structural feature of the compound.

[0284] In one embodiment, a method of inhibiting prostate cancer cell division is provided. The method comprises administration of a prostate cancer inhibitor. In another embodiment, a method of inhibiting prostate cancer is provided. The method comprises administration of a prostate cancer inhibitor. In a further embodiment, methods of treating cells or individuals with prostate cancer are provided. The method comprises administration of a prostate cancer inhibitor.

[0285] In one embodiment, a prostate cancer inhibitor is an antibody as discussed above. In another embodiment, the prostate cancer inhibitor is an antisense molecule.

[0286] A variety of cell growth, proliferation, and metastasis assays are known to those of skill in the art, as described below.

[0287] Soft Agar Growth or Colony Formation in Suspension

[0288] Normal cells require a solid substrate to attach and grow. When the cells are transformed, they lose this phenotype and grow detached from the substrate. For example, transformed cells can grow in stirred suspension culture or suspended in semi-solid media, such as semi-solid or soft agar. The transformed cells, when transfected with tumor suppressor genes, regenerate normal phenotype and require a solid substrate to attach and grow. Soft agar growth or colony formation in suspension assays can be used to identify modulators of prostate cancer sequences, which when expressed in host cells, inhibit abnormal cellular proliferation and transformation. A therapeutic compound would reduce or eliminate the host cells' ability to grow in stirred suspension culture or suspended in semi-solid media, such as semi-solid or soft.

[0289] Techniques for soft agar growth or colony formation in suspension assays are described in Freshney, Culture of Animal Cells a Manual of Basic Technique (3^{rd} ed., 1994), herein incorporated by reference. See also, the methods section of Garkavtsev et al. (1996), supra, herein incorporated by reference.

[0290] Contact Inhibition and Density Limitation of Growth

[0291] Normal cells typically grow in a flat and organized pattern in a petri dish until they touch other cells. When the cells touch one another, they are contact inhibited and stop growing. When cells are transformed, however, the cells are not contact inhibited and continue to grow to high densities in disorganized foci. Thus, the transformed cells grow to a higher saturation density than normal cells. This can be detected morphologically by the formation of a disoriented monolayer of cells or rounded cells in foci within the regular pattern of normal surrounding cells. Alternatively, labeling index with (³H)-thymidine at saturation density can be used to measure density limitation of growth. See Freshney (1994), supra. The transformed cells, when transfected with tumor suppressor genes, regenerate a normal phenotype and become contact inhibited and would grow to a lower density.

[0292] In this assay, labeling index with (³H)-thymidine at saturation density is a preferred method of measuring density limitation of growth. Transformed host cells are transfected with a prostate cancer-associated sequence and are grown for 24 hours at saturation density in non-limiting medium conditions. The percentage of cells labeling with (³H)-thymidine is determined autoradiographically. See, Freshney (1994), supra.

[0293] Growth Factor or Serum Dependence

[0294] Transformed cells have a lower serum dependence than their normal counterparts (see, e.g., Temin, J. Natl. Cancer Insti. 37:167-175 (1966); Eagle et al., J. Exp. Med. 131:836-879 (1970)); Freshney, supra. This is in part due to release of various growth factors by the transformed cells. Growth factor or serum dependence of transformed host cells can be compared with that of control.

[0295] Tumor Specific Markers Levels

[0296] Tumor cells release an increased amount of certain factors (hereinafter “tumor specific markers”) than their normal counterparts. For example, plasminogen activator (PA) is released from human glioma at a higher level than from normal brain cells (see, e.g., Gullino, Angiogenesis, tumor vascularization, and potential interference with tumor growth. in Biological Responses in Cancer, pp. 178-184 (Mihich (ed.) 1985)). Similarly, Tumor angiogenesis factor (TAF) is released at a higher level in tumor cells than their normal counterparts. See, e.g., Folkman, Angiogenesis and Cancer, Sem Cancer Biol. (1992)).

[0297] Various techniques which measure the release of these factors are described in Freshney (1994), supra. Also, see, Unkless et al., J. Biol. Chem. 249:4295-4305 (1974); Strickland & Beers, J. Biol. Chem. 251:5694-5702 (1976); Whur et al., Br. J. Cancer 42:305-312 (1980); Gullino, Angiogenesis, tumor vascularization, and potential interference with tumor growth. in Biological Responses in Cancer, pp. 178-184 (Mihich (ed.) 1985); Freshney Anticancer Res. 5:111-130 (1985).

[0298] Invasiveness Into Matrigel

[0299] The degree of invasiveness into Matrigel or some other extracellular matrix constituent can be used as an assay to identify compounds that modulate prostate cancer-associated sequences. Tumor cells exhibit a good correlation between malignancy and invasiveness of cells into Matrigel or some other extracellular matrix constituent. In this assay, tumorigenic cells are typically used as host cells. Expression of a tumor suppressor gene in these host cells would decrease invasiveness of the host cells.

[0300] Techniques described in Freshney (1994), supra, can be used. Briefly, the level of invasion of host cells can be measured by using filters coated with Matrigel or some other extracellular matrix constituent. Penetration into the gel, or through to the distal side of the filter, is rated as invasiveness, and rated histologically by number of cells and distance moved, or by prelabeling the cells with ¹²⁵I and counting the radioactivity on the distal side of the filter or bottom of the dish. See, e.g., Freshney (1984), supra.

[0301] Tumor Growth In Vivo

[0302] Effects of prostate cancer-associated sequences on cell growth can be tested in transgenic or immune-suppressed mice. Knock-out transgenic mice can be made, in which the prostate cancer gene is disrupted or in which a prostate cancer gene is inserted. Knock-out transgenic mice can be made by insertion of a marker gene or other heterologous gene into the endogenous prostate cancer gene site in the mouse genome via homologous recombination. Such mice can also be made by substituting the endogenous prostate cancer gene with a mutated version of the prostate cancer gene, or by mutating the endogenous prostate cancer gene, e.g., by exposure to carcinogens.

[0303] A DNA construct is introduced into the nuclei of embryonic stem cells. Cells containing the newly engineered genetic lesion are injected into a host mouse embryo, which is re-implanted into a recipient female. Some of these embryos develop into chimeric mice that possess germ cells partially derived from the mutant cell line. Therefore, by breeding the chimeric mice it is possible to obtain a new line of mice containing the introduced genetic lesion (see, e.g., Capecchi et al., Science 244:1288 (1989)). Chimeric targeted mice can be derived according to Hogan et al., Manipulating the Mouse Embryo: A Laboratory Manual, Cold Spring Harbor Laboratory (1988) and Teratocarcinomas and Embryonic Stem Cells: A Practical Approach, Robertson, ed., IRL Press, Washington, D.C., (1987).

[0304] Alternatively, various immune-suppressed or immune-deficient host animals can be used. For example, genetically athymic “nude” mouse (see, e.g., Giovanella et al., J. Natl. Cancer Inst. 52:921 (1974)), a SCID mouse, a thymectomized mouse, or an irradiated mouse (see, e.g., Bradley et al., Br. J. Cancer 38:263 (1978); Selby et al., Br. J. Cancer 41:52 (1980)) can be used as a host. Transplantable tumor cells (typically about 10⁶ cells) injected into isogenic hosts will produce invasive tumors in a high proportions of cases, while normal cells of similar origin will not. In hosts which developed invasive tumors, cells expressing a prostate cancer-associated sequences are injected subcutaneously. After a suitable length of time, preferably 4-8 weeks, tumor growth is measured (e.g., by volume or by its two largest dimensions) and compared to the control. Tumors that have statistically significant reduction (using, e.g., Student's T test) are said to have inhibited growth.

### Methods of Identifying Variant Prostate Cancer-Associated Sequences

[0305] Without being bound by theory, expression of various prostate cancer sequences is correlated with prostate cancer. Accordingly, disorders based on mutant or variant prostate cancer genes may be determined. In one embodiment, the invention provides methods for identifying cells containing variant prostate cancer genes, e.g., determining all or part of the sequence of at least one endogenous prostate cancer genes in a cell. This may be accomplished using any number of sequencing techniques. In a preferred embodiment, the invention provides methods of identifying the prostate cancer genotype of an individual, e.g., determining all or part of the sequence of at least one prostate cancer gene of the individual. This is generally done in at least one tissue of the individual, and may include the evaluation of a number of tissues or different samples of the same tissue. The method may include comparing the sequence of the sequenced prostate cancer gene to a known prostate cancer gene, i.e., a wild-type gene.

[0306] The sequence of all or part of the prostate cancer gene can then be compared to the sequence of a known prostate cancer gene to determine if any differences exist. This can be done using any number of known homology programs, such as Bestfit, etc. In a preferred embodiment, the presence of a difference in the sequence between the prostate cancer gene of the patient and the known prostate cancer gene correlates with a disease state or a propensity for a disease state, as outlined herein.

[0307] In a preferred embodiment, the prostate cancer genes are used as probes to determine the number of copies of the prostate cancer gene in the genome.

[0308] In another preferred embodiment, the prostate cancer genes are used as probes to determine the chromosomal localization of the prostate cancer genes. Information such as chromosomal localization finds use in providing a diagnosis or prognosis in particular when chromosomal abnormalities such as translocations, and the like are identified in the prostate cancer gene locus.

### Administration of Pharmaceutical and Vaccine Compositions

[0309] In one embodiment, a therapeutically effective dose of a prostate cancer protein or modulator thereof, is administered to a patient. By “therapeutically effective dose” herein is meant a dose that produces effects for which it is administered. The exact dose will depend on the purpose of the treatment, and will be ascertainable by one skilled in the art using known techniques (e.g., Ansel et al., Pharmaceutical Dosage Forms and Drug Delivery; Lieberman, Pharmaceutical Dosage Forms (vols. 1-3, 1992), Dekker, ISBN 0824770846, 082476918X, 0824712692, 0824716981; Lloyd, The Art, Science and Technology of Pharmaceutical Compounding (1999); and Pickar, Dosage Calculations (1999)). As is known in the art, adjustments for prostate cancer degradation, systemic versus localized delivery, and rate of new protease synthesis, as well as the age, body weight, general health, sex, diet, time of administration, drug interaction and the severity of the condition may be necessary, and will be ascertainable with routine experimentation by those skilled in the art. U.S. patent application Ser. No. 09/687,576, further discloses the use of compositions and methods of diagnosis and treatment in prostate cancer is hereby expressly incorporated by reference.

[0310] A “patient” for the purposes of the present invention includes both humans and other animals, particularly mammals. Thus the methods are applicable to both human therapy and veterinary applications. In the preferred embodiment the patient is a mammal, preferably a primate, and in the most preferred embodiment the patient is human.

[0311] The administration of the prostate cancer proteins and modulators thereof of the present invention can be done in a variety of ways as discussed above, including, but not limited to, orally, subcutaneously, intravenously, intranasally, transdermally, intraperitoneally, intramuscularly, intrapulmonary, vaginally, rectally, or intraocularly. In some instances, e.g., in the treatment of wounds and inflammation, the prostate cancer proteins and modulators may be directly applied as a solution or spray.

[0312] The pharmaceutical compositions of the present invention comprise a prostate cancer protein in a form suitable for administration to a patient. In the preferred embodiment, the pharmaceutical compositions are in a water soluble form, such as being present as pharmaceutically acceptable salts, which is meant to include both acid and base addition salts. “Pharmaceutically acceptable acid addition salt” refers to those salts that retain the biological effectiveness of the free bases and that are not biologically or otherwise undesirable, formed with inorganic acids such as hydrochloric acid, hydrobromic acid, sulfuric acid, nitric acid, phosphoric acid and the like, and organic acids such as acetic acid, propionic acid, glycolic acid, pyruvic acid, oxalic acid, maleic acid, malonic acid, succinic acid, fumaric acid, tartaric acid, citric acid, benzoic acid, cinnamic acid, mandelic acid, methanesulfonic acid, ethanesulfonic acid, p-toluenesulfonic acid, salicylic acid and the like. “Pharmaceutically acceptable base addition salts” include those derived from inorganic bases such as sodium, potassium, lithium, ammonium, calcium, magnesium, iron, zinc, copper, manganese, aluminum salts and the like. Particularly preferred are the ammonium, potassium, sodium, calcium, and magnesium salts. Salts derived from pharmaceutically acceptable organic non-toxic bases include salts of primary, secondary, and tertiary amines, substituted amines including naturally occurring substituted amines, cyclic amines and basic ion exchange resins, such as isopropylamine, trimethylamine, diethylamine, triethylamine, tripropylamine, and ethanolamine.

[0313] The pharmaceutical compositions may also include one or more of the following: carrier proteins such as serum albumin; buffers; fillers such as microcrystalline cellulose, lactose, corn and other starches; binding agents; sweeteners and other flavoring agents; coloring agents; and polyethylene glycol.

[0314] The pharmaceutical compositions can be administered in a variety of unit dosage forms depending upon the method of administration. For example, unit dosage forms suitable for oral administration include, but are not limited to, powder, tablets, pills, capsules and lozenges. It is recognized that prostate cancer protein modulators (e.g., antibodies, antisense constructs, ribozymes, small organic molecules, etc.) when administered orally, should be protected from digestion. This is typically accomplished either by complexing the molecule(s) with a composition to render it resistant to acidic and enzymatic hydrolysis, or by packaging the molecule(s) in an appropriately resistant carrier, such as a liposome or a protection barrier. Means of protecting agents from digestion are well known in the art.

[0315] The compositions for administration will commonly comprise a prostate cancer protein modulator dissolved in a pharmaceutically acceptable carrier, preferably an aqueous carrier. A variety of aqueous carriers can be used, e.g., buffered saline and the like. These solutions are sterile and generally free of undesirable matter. These compositions may be sterilized by conventional, well known sterilization techniques. The compositions may contain pharmaceutically acceptable auxiliary substances as required to approximate physiological conditions such as pH adjusting and buffering agents, toxicity adjusting agents and the like, e.g., sodium acetate, sodium chloride, potassium chloride, calcium chloride, sodium lactate and the like. The concentration of active agent in these formulations can vary widely, and will be selected primarily based on fluid volumes, viscosities, body weight and the like in accordance with the particular mode of administration selected and the patient's needs (e.g., Remington's Pharmaceutical Science (15th ed., 1980) and Goodman & Gillman, The Pharmacologial Basis of Therapeutics (Hardman et al., eds., 1996)).

[0316] Thus, a typical pharmaceutical composition for intravenous administration would be about 0.1 to 10 mg per patient per day. Dosages from 0.1 up to about 100 mg per patient per day may be used, particularly when the drug is administered to a secluded site and not into the blood stream, such as into a body cavity or into a lumen of an organ. Substantially higher dosages are possible in topical administration. Actual methods for preparing parenterally administrable compositions will be known or apparent to those skilled in the art, e.g., Remington's Pharmaceutical Science and Goodman and Gillman, The Pharmacologial Basis of Therapeutics, supra.

[0317] The compositions containing modulators of prostate cancer proteins can be administered for therapeutic or prophylactic treatments. In therapeutic applications, compositions are administered to a patient suffering from a disease (e.g., a cancer) in an amount sufficient to cure or at least partially arrest the disease and its complications. An amount adequate to accomplish this is defined as a “therapeutically effective dose.” Amounts effective for this use will depend upon the severity of the disease and the general state of the patient's health. Single or multiple administrations of the compositions may be administered depending on the dosage and frequency as required and tolerated by the patient. In any event, the composition should provide a sufficient quantity of the agents of this invention to effectively treat the patient. An amount of modulator that is capable of preventing or slowing the development of cancer in a mammal is referred to as a “prophylactically effective dose.” The particular dose required for a prophylactic treatment will depend upon the medical condition and history of the mammal, the particular cancer being prevented, as well as other factors such as age, weight, gender, administration route, efficiency, etc. Such prophylactic treatments may be used, e.g., in a mammal who has previously had cancer to prevent a recurrence of the cancer, or in a mammal who is suspected of having a significant likelihood of developing cancer.

[0318] It will be appreciated that the present prostate cancer protein-modulating compounds can be administered alone or in combination with additional prostate cancer modulating compounds or with other therapeutic agent, e.g., other anti-cancer agents or treatments.

[0319] In numerous embodiments, one or more nucleic acids, e.g., polynucleotides comprising nucleic acid sequences set forth in Tables 1-16, such as antisense polynucleotides or ribozymes, will be introduced into cells, in vitro or in vivo. The present invention provides methods, reagents, vectors, and cells useful for expression of prostate cancer-associated polypeptides and nucleic acids using in vitro (cell-free), ex vivo or in vivo (cell or organism-based) recombinant expression systems.

[0320] The particular procedure used to introduce the nucleic acids into a host cell for expression of a protein or nucleic acid is application specific. Many procedures for introducing foreign nucleotide sequences into host cells may be used. These include the use of calcium phosphate transfection, spheroplasts, electroporation, liposomes, microinjection, plasma vectors, viral vectors and any of the other well known methods for introducing cloned genomic DNA, cDNA, synthetic DNA or other foreign genetic material into a host cell (see, e.g., Berger & Kimmel, Guide to Molecular Cloning Techniques, Methods in Enzymology volume 152 (Berger), Ausubel et al., eds., Current Protocols (supplemented through 1999), and Sambrook et al., Molecular Cloning—A Laboratory Manual (2nd ed., Vol. 1-3, 1989.

[0321] In a preferred embodiment, prostate cancer proteins and modulators are administered as therapeutic agents, and can be formulated as outlined above. Similarly, prostate cancer genes (including both the full-length sequence, partial sequences, or regulatory sequences of the prostate cancer coding regions) can be administered in a gene therapy application. These prostate cancer genes can include antisense applications, either as gene therapy (i.e. for incorporation into the genome) or as antisense compositions, as will be appreciated by those in the art.

[0322] Prostate cancer polypeptides and polynucleotides can also be administered as vaccine compositions to stimulate HTL, CTL and antibody responses. Such vaccine compositions can include, e.g., lipidated peptides (see, e.g., Vitiello, A. et al., J. Clin. Invest. 95:341 (1995)), peptide compositions encapsulated in poly(DL-lactide-co-glycolide) (“PLG”) microspheres (see, e.g., Eldridge, et al., Molec. Immunol. 28:287-294, (1991); Alonso et al., Vaccine 12:299-306 (1994); Jones et al., Vaccine 13:675-681 (1995)), peptide compositions contained in immune stimulating complexes (ISCOMS) (see, e.g., Takahashi et al., Nature 344:873-875 (1990); Hu et al., Clin Exp Immunol. 113:235-243 (1998)), multiple antigen peptide systems (MAPs) (see, e.g., Tam, Proc. Natl. Acad. Sci. U.S.A. 85:5409-5413 (1988); Tam, J. Immunol. Methods 196:17-32 (1996)), peptides formulated as multivalent peptides; peptides for use in ballistic delivery systems, typically crystallized peptides, viral delivery vectors (Perkus, et al., In: Concepts in vaccine development (Kaufmann, ed., p. 379, 1996); Chakrabarti, et al., Nature 320:535 (1986); Hu et al., Nature 320:537 (1986); Kieny, et al., AIDS Bio/Technology 4:790 (1986); Top et al., J. Infect. Dis. 124:148 (1971); Chanda et al., Virology 175:535 (1990)), particles of viral or synthetic origin (see, e.g., Kofler et al., J. Immunol. Methods. 192:25 (1996); Eldridge et al., Sem. Hematol. 30:16 (1993); Falo et al., Nature Med. 7:649 (1995)), adjuvants (Warren et al., Annu. Rev. Immunol. 4:369 (1986); Gupta et al., Vaccine 11:293 (1993)), liposomes (Reddy et al., J. Immunol. 148:1585 (1992); Rock, Immunol. Today 17:131 (1996)), or, naked or particle absorbed cDNA (Ulmer, et al., Science 259:1745 (1993); Robinson et al., Vaccine 11:957 (1993); Shiver et al., In: Concepts in vaccine development (Kaufmann, ed., p. 423, 1996); Cease & Berzofsky, Annu. Rev. Immunol. 12:923 (1994) and Eldridge et al., Sem. Hematol. 30:16 (1993)). Toxin-targeted delivery technologies, also known as receptor mediated targeting, such as those of Avant Immunotherapeutics, Inc. (Needham, Mass.) may also be used.

[0323] Vaccine compositions often include adjuvants. Many adjuvants contain a substance designed to protect the antigen from rapid catabolism, such as aluminum hydroxide or mineral oil, and a stimulator of immune responses, such as lipid A, Bortadella pertussis or Mycobacterium tuberculosis derived proteins. Certain adjuvants are commercially available as, e.g., Freund's Incomplete Adjuvant and Complete Adjuvant (Difco Laboratories, Detroit, Mich.); Merck Adjuvant 65 (Merck and Company, Inc., Rahway, N.J.); AS-2 (SmithKline Beecham, Philadelphia, Pa.); aluminum salts such as aluminum hydroxide gel (alum) or aluminum phosphate; salts of calcium, iron or zinc; an insoluble suspension of acylated tyrosine; acylated sugars; cationically or anionically derivatized polysaccharides; polyphosphazenes; biodegradable microspheres; monophosphoryl lipid A and quil A. Cytokines, such as GM-CSF, interleukin-2, -7, -12, and other like growth factors, may also be used as adjuvants.

[0324] Vaccines can be administered as nucleic acid compositions wherein DNA or RNA encoding one or more of the polypeptides, or a fragment thereof, is administered to a patient. This approach is described, for instance, in Wolff et. al., Science 247:1465 (1990) as well as U.S. Pat. Nos. 5,580,859; 5,589,466; 5,804,566; 5,739,118; 5,736,524; 5,679,647; WO 98/04720; and in more detail below. Examples of DNA-based delivery technologies include “naked DNA”, facilitated (bupivicaine, polymers, peptide-mediated) delivery, cationic lipid complexes, and particle-mediated (“gene gun”) or pressure-mediated delivery (see, e.g., U.S. Pat. No. 5,922,687).

[0325] For therapeutic or prophylactic immunization purposes, the peptides of the invention can be expressed by viral or bacterial vectors. Examples of expression vectors include attenuated viral hosts, such as vaccinia or fowlpox. This approach involves the use of vaccinia virus, e.g., as a vector to express nucleotide sequences that encode prostate cancer polypeptides or polypeptide fragments. Upon introduction into a host, the recombinant vaccinia virus expresses the immunogenic peptide, and thereby elicits an immune response. Vaccinia vectors and methods useful in immunization protocols are described in, e.g., U.S. Pat. No. 4,722,848. Another vector is BCG (Bacille Calmette Guerin). BCG vectors are described in Stover et al., Nature 351:456-460 (1991). A wide variety of other vectors useful for therapeutic administration or immunization e.g. adeno and adeno-associated virus vectors, retroviral vectors, Salmonella typhi vectors, detoxified anthrax toxin vectors, and the like, will be apparent to those skilled in the art from the description herein (see, e.g., Shata et al., Mol Med Today 6:66-71 (2000); Shedlock et al., J Leukoc Biol 68:793-806 (2000); Hipp et al., In Vivo 14:571-85 (2000)).

[0326] Methods for the use of genes as DNA vaccines are well known, and include placing a prostate cancer gene or portion of a prostate cancer gene under the control of a regulatable promoter or a tissue-specific promoter for expression in a prostate cancer patient. The prostate cancer gene used for DNA vaccines can encode full-length prostate cancer proteins, but more preferably encodes portions of the prostate cancer proteins including peptides derived from the prostate cancer protein. In one embodiment, a patient is immunized with a DNA vaccine comprising a plurality of nucleotide sequences derived from a prostate cancer gene. For example, prostate cancer-associated genes or sequence encoding subfragments of a prostate cancer protein are introduced into expression vectors and tested for their immunogenicity in the context of Class I MHC and an ability to generate cytotoxic T cell responses. This procedure provides for production of cytotoxic T cell responses against cells which present antigen, including intracellular epitopes.

[0327] In a preferred embodiment, the DNA vaccines include a gene encoding an adjuvant molecule with the DNA vaccine. Such adjuvant molecules include cytokines that increase the immunogenic response to the prostate cancer polypeptide encoded by the DNA vaccine. Additional or alternative adjuvants are available.

[0328] In another preferred embodiment prostate cancer genes find use in generating animal models of prostate cancer. When the prostate cancer gene identified is repressed or diminished in cancer tissue, gene therapy technology, e.g., wherein antisense RNA directed to the prostate cancer gene will also diminish or repress expression of the gene. Animal models of prostate cancer find use in screening for modulators of a prostate cancer-associated sequence or modulators of prostate cancer. Similarly, transgenic animal technology including gene knockout technology, e.g. as a result of homologous recombination with an appropriate gene targeting vector, will result in the absence or increased expression of the prostate cancer protein. When desired, tissue-specific expression or knockout of the prostate cancer protein may be necessary.

[0329] It is also possible that the prostate cancer protein is overexpressed in prostate cancer. As such, transgenic animals can be generated that overexpress the prostate cancer protein. Depending on the desired expression level, promoters of various strengths can be employed to express the transgene. Also, the number of copies of the integrated transgene can be determined and compared for a determination of the expression level of the transgene. Animals generated by such methods find use as animal models of prostate cancer and are additionally useful in screening for modulators to treat prostate cancer.

Kits for Use in Diagnostic and/or Prognostic Applications

[0330] For use in diagnostic, research, and therapeutic applications suggested above, kits are also provided by the invention. In the diagnostic and research applications such kits may include any or all of the following: assay reagents, buffers, prostate cancer-specific nucleic acids or antibodies, hybridization probes and/or primers, antisense polynucleotides, ribozymes, dominant negative prostate cancer polypeptides or polynucleotides, small molecules inhibitors of prostate cancer-associated sequences etc. A therapeutic product may include sterile saline or another pharmaceutically acceptable emulsion and suspension base.

[0331] In addition, the kits may include instructional materials containing directions (i.e., protocols) for the practice of the methods of this invention. While the instructional materials typically comprise written or printed materials they are not limited to such. Any medium capable of storing such instructions and communicating them to an end user is contemplated by this invention. Such media include, but are not limited to electronic storage media (e.g., magnetic discs, tapes, cartridges, chips), optical media (e.g., CD ROM), and the like. Such media may include addresses to internet sites that provide such instructional materials.

[0332] The present invention also provides for kits for screening for modulators of prostate cancer-associated sequences. Such kits can be prepared from readily available materials and reagents. For example, such kits can comprise one or more of the following materials: a prostate cancer-associated polypeptide or polynucleotide, reaction tubes, and instructions for testing prostate cancer-associated activity. Optionally, the kit contains biologically active prostate cancer protein. A wide variety of kits and components can be prepared according to the present invention, depending upon the intended user of the kit and the particular needs of the user. Diagnosis would typically involve evaluation of a plurality of genes or products. The genes will be selected based on correlations with important parameters in disease which may be identified in historical or outcome data.

### EXAMPLES

### Example 1

### Tissue Preparation, Labeling Chips, and Fingerprints

[0333] Purifying Total RNA from Tissue Sample Using Trizol Reagent

[0334] The sample weight is first estimated. The tissue samples are homogenized in 1 ml of TRIzol per 50 mg of tissue using a homogenizer (e.g., Polytron 3100). The size of the generator/probe used depends upon the sample amount. A generator that is too large for the amount of tissue to be homogenized will cause a loss of sample and lower RNA yield. A larger generator (e.g., 20 mm) is suitable for tissue samples weighing more than 0.6 g. Fill tubes should not be overfilled. If the working volume is greater than 2 ml and no greater than 10 ml, a 15 ml polypropylene tube (Falcon 2059) is suitable for homogenization.

[0335] Tissues should be kept frozen until homogenized. The TRIzol is added directly to the frozen tissue before homogenization. Following homogenization, the insoluble material is removed from the homogenate by centrifugation at 7500×g for 15 min. in a Sorvall superspeed or 12,000×g for 10 min. in an Eppendorf centrifuge at 4° C. The cleared homogenate is then transferred to a new tube(s). Samples may be frozen and stored at −60 to −70° C. for at least one month or else continue with the purification.

[0336] The next process is phase separation. The homogenized samples are incubated for 5 minutes at room temperature. Then, 0.2 ml of chloroform per 1 ml of TRIzol reagent is added to the homogenization mixture. The tubes are securely capped and shaken vigorously by hand (do not vortex) for 15 seconds. The samples are then incubated at room temp. for 2-3 minutes and next centrifuged at 6500 rpm in a Sorvall superspeed for 30 min. at 4oC.

[0337] The next process is RNA Precipitation. The aqueous phase is transferred to a fresh tube. The organic phase can be saved if isolation of DNA or protein is desired. Then 0.5 ml of isopropyl alcohol is added per 1 ml of TRIzol reagent used in the original homogenization. Then, the tubes are securely capped and inverted to mix. The samples are then incubated at room temp. for 10 minutes an centrifuged at 6500 rpm in Sorvall for 20 min. at 4° C.

[0338] The RNA is then washed. The supernatant is poured off and the pellet washed with cold 75% ethanol. 1 ml of 75% ethanol is used per 1 ml of the TRIzol reagent used in the initial homogenization. The tubes are capped securely and inverted several times to loosen pellet without vortexing. They are next centrifuged at <8000 rpm (<7500×g) for 5 minutes at 4° C.

[0339] The RNA wash is decanted. The pellet is carefully transferred to an Eppendorf tube (sliding down the tube into the new tube by use of a pipet tip to help guide it in if necessary). Tube(s) sizes for precipitating the RNA depending on the working volumes. Larger tubes may take too long to dry. Dry pellet. The RNA is then resuspended in an appropriate volume (e.g., 2-5 ug/ul) of DEPC H₂0. The absorbance is then measured.

[0340] The poly A+ mRNA may next be purified from total RNA by other methods such as Qiagen's RNeasy kit. The poly A⁺ mRNA is purified from total RNA by adding the oligotex suspension which has been heated to 37° C. and mixing prior to adding to RNA. The Elution Buffer is incubated at 70° C. If there is precipitate in the buffer, warm up the 2× Binding Buffer at 65° C. The total RNA is mixed with DEPC-treated water, 2× Binding Buffer, and Oligotex according to Table 2 on page 16 of the Oligotex Handbook and next incubated for 3 minutes at 65° C. and 10 minutes at room temperature.

[0341] The preparation is centrifuged for 2 minutes at 14,000 to 18,000 g, preferably, at a “soft setting,” The supernatant is removed without disturbing Oligotex pellet. A little bit of solution can be left behind to reduce the loss of Oligotex. The supernatant is saved until satisfactory binding and elution of poly A⁺ mRNA has been found.

[0342] Then, the preparation is gently resuspended in Wash Buffer OW2 and pipetted onto the spin column and centrifuged at full speed (soft setting if possible) for 1 minute.

[0343] Next, the spin column is transferred to a new collection tube and gently resuspended in Wash Buffer OW2 and centrifuged as described herein.

[0344] Then, the spin column is transferred to a new tube and eluted with 20 to 100 ul of preheated (70° C.) Elution Buffer. The Oligotex resin is gently resuspended by pipetting up and down. The centrifugation is repeated as above and the elution repeated with fresh elution buffer or first eluate to keep the elution volume low.

[0345] The absorbance is next read to determine the yield, using diluted Elution Buffer as the blank.

[0346] Before proceeding with cDNA synthesis, the mRNA is precipitated before proceeding with cDNA synthesis, as components leftover or in the Elution Buffer from the Oligotex purification procedure will inhibit downstream enzymatic reactions of the mRNA. 0.4 vol. of 7.5 M NH4OAc+2.5 vol. of cold 100% ethanol is added and the preparation precipitated at −20° C. 1 hour to overnight (or 20-30 min. at −70° C.), and centrifuged at 14,000-16,000×g for 30 minutes at 4° C. Next, the pellet is washed with 0.5 ml of 80% ethanol (−20° C.) and then centrifuged at 14,000-16,000×g for 5 minutes at room temperature. The 80% ethanol wash is then repeated. The last bit of ethanol from the pellet is then dried without use of a speed vacuum and the pellet is then resuspended in DEPC H₂0 at 1 ug/ul concentration.

### Alternatively the RNA may be Purified Using Other Methods (E.g., Qiagen's RNeasy Kit).

[0347] No more than 100 ug is added to the RNeasy column. The sample volume is adjusted to 100 ul with RNase-free water. 350 ul Buffer RLT and then 250 ul ethanol (100%) are added to the sample. The preparation is then mixed by pipetting and applied to an RNeasy mini spin column for centrifugation (15 sec at >10,000 rpm). If yield is low, reapply the flowthrough to the column and centrifuge again.

[0348] Then, transfer column to a new 2 ml collection tube and add 500 ul Buffer RPE and centrifuge for 15 sec at >10,000 rpm. The flowthrough is discarded. 500 ul Buffer RPE and is then added and the preparation is centrifuged for 15 sec at >10,000 rpm. The flowthrough is discarded. and the column membrane dried by centrifuging for 2 min at maximum speed. The column is transferred to a new 1.5-ml collection tube. 30-50 ul of RNase-free water is applied directly onto column membrane. The column is then centrifuged for 1 min at >10,000 rpm and the elution step repeated.

[0349] The absorbance is then read to determine yield. If necessary, the material may be ethanol precipitated with ammonium acetate and 2.5× volume 100% ethanol.

First Strand cDNA Synthesis

[0350] The first strand can be make using Gibco's “SuperScript Choice System for cDNA Synthesis” kit. The starting material is 5 ug of total RNA or 1 ug of polyA+ mRNA1. For total RNA, 2 ul of SuperScript RT is used; for polyA+ mRNA, 1 ul of SuperScript RT is used. The final volume of first strand synthesis mix is 20 ul. The RNA should be in a volume no greater than 10 ul. The RNA is incubated with 1 ul of 100 pmol T7-T24 oligo for 10 min at 70° C. followed by addition on ice of 7 ul of: 4 ul 5×1^{st} Strand Buffer, 2 ul of 0.1 M DTT, and 1 ul of 10 mM dNTP mix. The preparation is then incubated at 37° C. for 2 min before addition of the SuperScript RT followed by incubation at 37° C. for 1 hour.

### Second Strand Synthesis

[0351] For the second strand synthesis, place 1st strand reactions on ice and add: 91 ul DEPC H₂O; 30 ul 5× 2nd Strand Buffer; 3 ul 10 mM dNTP mix; 1 ul 10 U/ul E. coli DNA Ligase; 4 ul 10 U/ul E. coli DNA Polymerase; and 1 ul 2 U/ul RNase H. Mix and incubate 2 hours at 16° C. Add 2 ul T4 DNA Polymerase. Incubate 5 min at 16° C. Add 10 ul of 0.5M EDTA.

Cleaning Up cDNA

[0352] The cDNA is purified using Phenol:Chloroform:Isoamyl Alcohol (25:24:1) and Phase-Lock gel tubes. The PLG tubes are centrifuged for 30 sec at maximum speed. The cDNA mix is then transferred to PLG tube. An equal volume of phenol:chloroform:isamyl alcohol is then added, the preparation shaken vigorously (no vortexing), and centrifuged for 5 minutes at maximum speed. The top aqueous solution is transferred to a new tube and ethanol precipitated by adding 7.5×5M NH4OAc and 2.5× volume of 100% ethanol. Next, it is centrifuged immediately at room temperature for 20 min, maximum speed. The supernatant is removed, and the pellet washed with 2× with cold 80% ethanol. As much ethanol wash as possible should be removed before air drying the pellet; and resuspending it in 3 ul RNase-free water.

In Vitro Transcription (IVT) and Labeling with Biotin

[0353] In vitro Transcription (IVT) and labeling with biotin is performed as follows: Pipet 1.5 ul of cDNA into a thin-wall PCR tube. Make NTP labeling mix by combining 2 ul T7 10×ATP (75 mM) (Ambion); 2 ul T7 10×GTP (75 mM) (Ambion); 1.5 ul T7 10xCTP (75 mM) (Ambion); 1.5 ul T7 10×UTP (75 mM) (Ambion); 3.75 ul 10 mM Bio-11-UTP (Boehringer-Mannheim/Roche or Enzo); 3.75 ul 10 mM Bio-16-CTP (Enzo); 2 ul 10×T7 transcription buffer (Ambion); and 2 ul 10×T7 enzyme mix (Ambion). The final volume is 20 ul. Incubate 6 hours at 37° C. in a PCR machine. The RNA can be furthered cleaned. Clean-up follows the previous instructions for RNeasy columns or Qiagen's RNeasy protocol handbook. The cRNA often needs to be ethanol precipitated by resuspension in a volume compatible with the fragmentation step.

[0354] Fragmentation is performed as follows. 15 ug of labeled RNA is usually fragmented. Try to minimize the fragmentation reaction volume; a 10 ul volume is recommended but 20 ul is all right. Do not go higher than 20 ul because the magnesium in the fragmentation buffer contributes to precipitation in the hybridization buffer. Fragment RNA by incubation at 94 C for 35 minutes in 1× Fragmentation buffer (5× Fragmentation buffer is 200 mM Tris-acetate, pH 8.1; 500 mM KOAc; 150 mM MgOAc). The labeled RNA transcript can be analyzed before and after fragmentation. Samples can be heated to 65° C. for 15 minutes and electrophoresed on 1% agarose/TBE gels to get an approximate idea of the transcript size range.

[0355] For hybridization, 200 ul (10 ug cRNA) of a hybridization mix is put on the chip. If multiple hybridizations are to be done (such as cycling through a 5 chip set), then it is recommended that an initial hybridization mix of 300 ul or more be made. The hybridization mix is: fragment labeled RNA (50 ng/ul final conc.); 50 pM 948-b control oligo; 1.5 pM BioB; 5 pM BioC; 25 pM BioD; 100 pM CRE; 0.1 mg/ml herring sperm DNA; 0.5 mg/ml acetylated BSA; and 300 ul with 1×MES hyb buffer.

[0356] The hybridization reaction is conducted with non-biotinylated IVT (purified by RNeasy columns) (see example 1 for steps from tissue to IVT): The following mixture is prepared:

| IVT antisense RNA; 4 μg: | | μl |
|---|---|---|
| Random Hexamers (1 μg/μl): | 4 | μl |
| H₂O: | | μl |
| | 14 | μl |

Incubate the above 14 μl mixture at 70° C. for 10 min.; then put on ice.

[0357] The Reverse transcription procedure uses the following mixture:

| | | |
|---|---|---|
| 0.1 M DTT: | 3 | μl |
| 50X dNTP mix: | 0.6 | μl |
| H₂O: | 2.4 | μl |
| Cy3 or Cy5 dUTP (1 mM): | 3 | μl |
| SS RT II (BRL): | 1 | μl |
| | 16 | μl |

The above solution is added to the hybridization reaction and incubated for 30 min., 42° C. Then, 1 μl SSII is added and incubated for another hour before being placed on ice.

[0358] The 50× dNTP mix contains 25 mM of cold dATP, dCTP, and dGTP, 10 mM of dTTP and is made by adding 25 μl each of 100 mM dATP, dCTP, and dGTP; 10 μl of 100 mM dTTP to 15 μl H₂O. I

[0359] RNA degradation is performed as follows. Add 86 μl H2O, 1.5 μl 1M NaOH/2 mM EDTA and incubate at 65° C., 10 min. For U-Con 30, 500 μl TE/sample spin at 7000 g for 10 min, save flow through for purification. For Qiagen purification, suspend u-con recovered material in 500 μl buffer PB and proceed using Qiagen protocol. For DNAse digestion, add 1 ul of 1/100 dilution of DNAse/30 ul Rx and incubate at 37° C. for 15 min. Incubate at 5 min 95° C. to denature the DNAse.

### Sample Preparation

[0360] For sample preparation, add Cot-1 DNA, 10 μl; 50× dNTPs, 1 μl; 20×SSC, 2.3 μl; Na pyro phosphate, 7.5 μl; 10 mg/ml Herring sperm DNA; 1 ul of 1/10 dilution to 21.8 final vol. Dry in speed vac. Resuspend in 15 μl H₂O. Add 0.38 μl 10% SDS. Heat 95° C., 2 min and slow cool at room temp. for 20 min. Put on slide and hybridize overnight at 64° C. Washing after the hybridization: 3×SSC/0.03% SDS: 2 min., 37.5 ml 20×SSC-0.75 ml 10% SDS in 250 ml H₂O; 1×SSC: 5 min., 12.5 ml 20×SSC in 250 ml H₂O; 0.2×SSC: 5 min., 2.5 ml 20×SSC in 250 ml H₂O. Dry slides and scan at appropiate PMT's and channels.

### Example 2

### Taxol Resistant Xenograft Model of Human Prostate Cancer

[0361] Treatment regimens that include paclitaxel (Taxol; Bristol-Myers Squibb Company, Princeton, N.J.) have been particularly successful in treating hormone-refractory prostate cancer in the phase II setting (Smith et al., Semin. Oncol. 26(1 Suppl 2):109-11 (1999)). However, many patients develop tumors which are initially, or later become, resistant to taxol. To identify genes that may be involved with resistance to taxol, or are regulated in response to taxol resistance, and therefore may be used to treat, or identify, taxol resistance in patients, the following experiments were carried out.

[0362] The androgen-independent human cell line CWR22R was grown as a xenograft in nude mice (Nagabhushan et al., Cancer Res. 56(13):3042-3046 (1996); Agus et al., J. Natl. Cancer Inst. 91(21):1869-1876 (1999); Bubendorf et al., J. Natl. Cancer Inst. 91(20):1758-1764 (1999)). Initially, these xenograft tumors were sensitive to therapeutic doses of taxol. The mice were treated continuously with sub-therapeutic doses, and the tumors were allowed to grow for 3-4 weeks, before surgical removal of the tumors. The tumor from an individual mouse was then minced, and a small portion was then injected into a healthy nude mouse, establishing a second

[0363] passage of the tumor. This mouse was then treated continuously with the same sub-therapeutic dose of taxol. This process was repeated 14 times, and a portion of each generation of xenograft tumor was collected. There was increasing resistance to therapeutic doses of taxol with each generation. Bythe end of the process, the tumors were fully resistant to therapeutic doses of taxol. RNA from each generation of tumor was then isolated, and individual mRNA species were quantified using a custom Affymetrix GeneChip® oligonucleotide microarray, with probes to interrogate approximately 35,000 unique mRNA transcripts. Genes were selected that showed a statistically significant up-regulation, or down-regulation, during the subsequent generations of increasingly taxol-resistant tumors. Only one gene was significantly up-regulated, whereas 24 genes were down-regulated; these are presented in Table 10.

[0364] The gene sequences identified to be overexpressed in prostate cancer may be used to identify coding regions from the public DNA database. The sequences may be used to either identify genes that encode known proteins, or they may be used to predict the coding regions from genomic DNA using exon prediction algorithms, such as FGENESH (Salamov and Solovyev, 2000, Genome Res. 10:516-522). In addition, one of ordinary skill in the art would understand how to obtain the unigene cluster identification and sequence information according to the exemplar accession numbers provided in Tables 1-16. (see, http://www.ncbi.nlm.nih.gov/UniGene/).

Lengthy table referenced here
US20100297152A1-20101125-T00001
Please refer to the end of the specification for access instructions.

Lengthy table referenced here
US20100297152A1-20101125-T00002
Please refer to the end of the specification for access instructions.

Lengthy table referenced here
US20100297152A1-20101125-T00003
Please refer to the end of the specification for access instructions.

Lengthy table referenced here
US20100297152A1-20101125-T00004
Please refer to the end of the specification for access instructions.

Lengthy table referenced here
US20100297152A1-20101125-T00005
Please refer to the end of the specification for access instructions.

Lengthy table referenced here
US20100297152A1-20101125-T00006
Please refer to the end of the specification for access instructions.

Lengthy table referenced here
US20100297152A1-20101125-T00007
Please refer to the end of the specification for access instructions.

Lengthy table referenced here
US20100297152A1-20101125-T00008
Please refer to the end of the specification for access instructions.

Lengthy table referenced here
US20100297152A1-20101125-T00009
Please refer to the end of the specification for access instructions.

Lengthy table referenced here
US20100297152A1-20101125-T00010
Please refer to the end of the specification for access instructions.

Lengthy table referenced here
US20100297152A1-20101125-T00011
Please refer to the end of the specification for access instructions.

Lengthy table referenced here
US20100297152A1-20101125-T00012
Please refer to the end of the specification for access instructions.

Lengthy table referenced here
US20100297152A1-20101125-T00013
Please refer to the end of the specification for access instructions.

Lengthy table referenced here
US20100297152A1-20101125-T00014
Please refer to the end of the specification for access instructions.

Lengthy table referenced here
US20100297152A1-20101125-T00015
Please refer to the end of the specification for access instructions.

Lengthy table referenced here
US20100297152A1-20101125-T00016
Please refer to the end of the specification for access instructions.

Lengthy table referenced here
US20100297152A1-20101125-T00017
Please refer to the end of the specification for access instructions.

Lengthy table referenced here
US20100297152A1-20101125-T00018
Please refer to the end of the specification for access instructions.

Lengthy table referenced here
US20100297152A1-20101125-T00019
Please refer to the end of the specification for access instructions.

Lengthy table referenced here
US20100297152A1-20101125-T00020
Please refer to the end of the specification for access instructions.

Lengthy table referenced here
US20100297152A1-20101125-T00021
Please refer to the end of the specification for access instructions.

Lengthy table referenced here
US20100297152A1-20101125-T00022
Please refer to the end of the specification for access instructions.

Lengthy table referenced here
US20100297152A1-20101125-T00023
Please refer to the end of the specification for access instructions.

Lengthy table referenced here
US20100297152A1-20101125-T00024
Please refer to the end of the specification for access instructions.

Lengthy table referenced here
US20100297152A1-20101125-T00025
Please refer to the end of the specification for access instructions.

Lengthy table referenced here
US20100297152A1-20101125-T00026
Please refer to the end of the specification for access instructions.

Lengthy table referenced here
US20100297152A1-20101125-T00027
Please refer to the end of the specification for access instructions.

Lengthy table referenced here
US20100297152A1-20101125-T00028
Please refer to the end of the specification for access instructions.

Lengthy table referenced here
US20100297152A1-20101125-T00029
Please refer to the end of the specification for access instructions.

Lengthy table referenced here
US20100297152A1-20101125-T00030
Please refer to the end of the specification for access instructions.

Lengthy table referenced here
US20100297152A1-20101125-T00031
Please refer to the end of the specification for access instructions.

Lengthy table referenced here
US20100297152A1-20101125-T00032
Please refer to the end of the specification for access instructions.

Lengthy table referenced here
US20100297152A1-20101125-T00033
Please refer to the end of the specification for access instructions.

Lengthy table referenced here
US20100297152A1-20101125-T00034
Please refer to the end of the specification for access instructions.

Lengthy table referenced here
US20100297152A1-20101125-T00035
Please refer to the end of the specification for access instructions.

Lengthy table referenced here
US20100297152A1-20101125-T00036
Please refer to the end of the specification for access instructions.

[0365] It is understood that the examples described above in no way serve to limit the true scope of this invention, but rather are presented for illustrative purposes. All publications, sequences of accession numbers, and patent applications cited in this specification are herein incorporated by reference as if each individual publication or patent application were specifically and individually indicated to be incorporated by reference.

LENGTHY TABLES
The patent application contains a lengthy table section. A copy of the table is available in electronic form from the USPTO web site (http://seqdata.uspto.gov/?pageRequest=docDetail&DocID=US20100297152A1). An electronic copy of the table will also be available from the USPTO upon request and payment of the fee set forth in 37 CFR 1.19(b)(3).

The application's sequence listing, which the Patent Office published only in electronic form, follows.

SEQUENCE LISTING (294 sequences)

SEQ ID NO: 1 - DNA, 4793 bp, Homo sapiens
attggatcaaacatgtcacaagagtcggacaataataaaagactagtggccttagtgcccatgcccagtgaccctccattcaatacccgaagagcctacaccagtgaggatgaagcctggaagtcatacttggagaatcccctgacagcagccaccaaggccatgatgatcattaatggtgatgaggacagtgctgctgccctcggcctgctctatgactactacaaggttcctcgagacaagaggctgctgtctgtaagcaaagcaagtgacagccaagaagaccaggagaaaagaaactgccttggcaccagtgaagcccagagtaatttgagtggaggagaaaaccgagtgcaagtcctaaagactgttccagtgaacctttccctaaatcaagatcacctggagaattccaagcgggaacagtacagcatcagcttccccgagagctctgccatcatcccggtgtcgggaatcacggtggtgaaagctgaagatttcacaccagttttcatggccccacctgtgcactatccccggggagatggggaagagcaacgagtggttatctttgaacagactcagtatgacgtgccctcgctggccacccacagcgcctatctcaaagacgaccagcgcagcactccggacagcacatacagcgagagcttcaaggacgcagccacagagaaatttcggagtgcttcagttggggctgaggagtacatgtatgatcagacatcaagtggcacatttcagtacaccctggaagccaccaaatctctccgtcagaagcagggggagggccccatgacctacctcaacaaaggacagttctatgccataacactcagcgagaccggagacaacaaatgcttccgacaccccatcagcaaagtcaggagtgtggtgatggtggtcttcagtgaagacaaaaacagagatgaacagctcaaatactggaaatactggcactctcggcagcatacggcgaagcagagggtccttgacattgccgattacaaggagagctttaatacgattggaaacattgaagagattgcatataatgctgtttcctttacctgggacgtgaatgaagaggcgaagattttcatcaccgtgaattgcttgagcacagatttctcctcccaaaaaggggtgaaaggacttcctttgatgattcagattgacacatacagttataacaatcgtagcaataaacccattcatagagcttattgccagatcaaggtcttctgtgacaaaggagcagaaagaaaaatccgagatgaagagcagaagcagaacaggaagaacgggaaaggccaggcctcccaaactcaatgcaacagctcctctgatgggaagttggctgccatacctttacagaagaagagtgacatcacctacttcaaaaccatgcctgatctccactcacagccagttctcttcatacctgatgttcactttgcaaacctgcagaggaccggacaggtgtattacaacacggatgatgaacgagaaggtggcagtgtccttgttaaacggatgttccggcccatggaagaggagtttggtccggtgccttcaaagcagatgaaagaagaagggacaaagcgagtgctcttgtacgtgaggaaggagactgacgatgtgttcgatgcattgatgttgaagtctcccacagtgatgggcctgatggaagcgatatctgagaaatatgggctgcccgtggagaagatagcaaagctttacaagaaaagcaaaaaaggcatcttggtgaacatggatgacaacatcatcgagcactactcgaacgaggacaccttcatcctcaacatggagagcatggtggagggcttcaaggtcacgctcatggaaatctagccctgggtttggcatccgctttggctggagctctcagtgcgttcctccctgagagagacagaagccccagccccagaacctggagacccatctcccccatctcacaactgctgttacaagaccgtgctggggagtggggcaagggacaggccccacagtcggtgtgcttggcccatccactggcacctaccacggagccgaagcctgagcccctcaggaaggtgccttaggcctgttggattcctatttattgcccaccttttcctggagcccaggtccaggcccgccaggactctgcaggtcactgctagctccagatgagaccgtccagcgttcccccttcaagagaaacactcatcccgaacagcctaaaaaattcccatcccttctttctcacccctccatatctatatctcccgagtggctggacaaaatgagctacgtctgggtgcagtagttataggtggggcaagaggtggatgcccactttctggtcagacacctttaggttgctctggggaaggctgtcttgctaaatacctccagggttcccagcaagtggccaccaggccttgtacaggaagacattcagtcaccgtgtaattagtaacacagaaagtctgcctgtctgcattgtacatagtgtttataatattgtaataatatattttacctgtggtatgtgggcatgtttactgccactggcctagaggagacacagacctggagaccgttttaatgggggtttttgcctctgtgcctgttcaagagacttgcagggctaggtagagggcctttgggatgttaaggtgactgcagctgatgccaagatggactctgcaatgggcatacctgggggctcgttccctgtccccagaggaagccccctctccttctccatgggcatgactctccttcgaggccaccacgtttatctcacaatgatgtgttttgcctgactttccctttgcgctgtctcgtgggaaaggtcattctgtctgagaccccagctccttctccagctttggctgcgggcatggcctgagctttctggagagcctctgcagggggtttgccatcagggccctgtggctgggtctgctgcagagctccttggctatcaggagaatcctggacactgtactgtgcctcccagtttacaaacacgcccttcatctcaagtggccctttaaaaggcctgctgccatgtgagagctgtgaacagctcagctctgagtcggcagactggggcttcctcctgggccaccagatggaaagggggtattgtttgcctcactcctggatgctgcgttttaaggaagtgagtgagaaagaatgtgccaagatacctggctcctgtgaaaccagcctcaggagggaaactgggagagagaagctgtggtctcctgctacatgccctgggagctggaagagaaaaacactcccctaaacaatcgcaaaatgatgaaccatcatgggccactgttctctttgaggggacaggtttaggggtttgcgttcgcccttgtgggctgaagcactagctttttggtagctagacacatcctgcacccaaaggttctctacaaaggcccagatttgtttgtaaagcactttgactcttacctggaggcccgctctctaagggcttcctgcgctcccacctcatctgtccctgagatgcagagcaggatggagggtctgcttctagctcagctgtttctccttgaggttgcggaggaattgaattgaatgggacagagggcaggtgctgtggccaagaagatctccgagcagcagtgacggggcaccttgctgtgtgtcctctgggcatgttaacccttctgtggggccaaaggtttgcatcgtggatccagctgtgctccagtctgtcccctcctcctccactctgactgccacgccccggaccagcagcttggggaccctccagggtactaatggggctctgttctgagatggacaaattcagtgttggaaatacatgttgtactatgcacttcccatgctcctagggttaggaatagtttcaaacatgattggcagacataacaacggcaaatactcggactggggcataggactccagagtaggaaaaagacaaaagatttggcagcctgacacaggcaacctacccctctctctccagcctctttatgaaactgtttgtttgccagtcctgccctaaggcagaagatgaattgaagatgctgtgcatgtttcctaagtccttgagcaatcatggtggtgacaattgccacaagggatatgaggccagtgccaccagagggtggtgccaagtgccacatcccttccgatccattcccctctgtatcctcggagcaccccagtttgcctttgatgtgtccgctgtgtatgttagctgaactttgatgagcaaaatttcctgagcgaaacactccaaagagataggaaaacttgccgcctcttcttttttgtcccttaatcaaactcaaataagcttaaaaaaaatccatggaagatcatggacatgtgaaatgagcatttttttcttttctttttttttttttttttttaacaaagtctgaactgaacagaacaagactttttcctcatacatctccaaattgtttaaacttactttatgagtgtttgtttagaagttcggaccaacagaaaaatgcagtcagatgtcatcttggaattggtttctaaaagagtaaggcatgtccctgcccagaaacttaggaagcatgaaataaatcaaatgtttattttccttcttatttaaaatcatgctaatgcaacagaaatagagggtttgtgccaaatgctatgaacggccctttcttaaagacaagcaagggagattgatatatgtacaatttgctctcatgttttt

SEQ ID NO: 2 - protein, 625 aa, Homo sapiens
MSQESDNNKRLVALVPMPSDPPFNTRRAYTSEDEAWKSYLENPLTAATKAMMIINGDEDSAAALGLLYDYYKVPRDKRLLSVSKASDSQEDQEKRNCLGTSEAQSNLSGGENRVQVLKTVPVNLSLNQDHLENSKREQYSISFPESSAIIPVSGITVVKAEDFTPVFMAPPVHYPRGDGEEQRVVIFEQTQYDVPSLATHSAYLKDDQRSTPDSTYSESFKDAATEKFRSASVGAEEYMYDQTSSGTFQYTLEATKSLRQKQGEGPMTYLNKGQFYAITLSETGDNKCFRHPISKVRSVVMVVFSEDKNRDEQLKYWKYWHSRQHTAKQRVLDIADYKESFNTIGNIEEIAYNAVSFTWDVNEEAKIFITVNCLSTDFSSQKGVKGLPLMIQIDTYSYNNRSNKPIHRAYCQIKVFCDKGAERKIRDEEQKQNRKNGKGQASQTQCNSSSDGKLAAIPLQKKSDITYFKTMPDLHSQPVLFIPDVHFANLQRTGQVYYNTDDEREGGSVLVKRMFRPMEEEFGPVPSKQMKEEGTKRVLLYVRKETDDVFDALMLKSPTVMGLMEAISEKYGLPVEKIAKLYKKSKKGILVNMDDNIIEHYSNEDTFILNMESMVEGFKVTLMEI

SEQ ID NO: 3 - DNA, 777 bp, Homo sapiens
atgatagcaatctctgccgtcagcagtgcactcctgttctcccttctctgtgaagcaagtaccgtcgtcctactcaattccactgactcatccccgccaaccaataatttcactgatattgaagcagctctgaaagcacaattagattcagcggatatccccaaagccaggcggaagcgctacatttcgcagaatgacatgatcgccattcttgattatcataatcaagttcggggcaaagtgttcccaccggcagcaaatatggaatatatggtttgggatgaaaatcttgcaaaatcggcagaggcttgggcggctacttgcatttgggaccatggaccttcttacttactgagatttttgggccaaaatctatctgtacgcactggaagatatcgctctattctccagttggtcaagccatggtatgatgaagtgaaagattatgcttttccatatccccaggattgcaaccccagatgtcctatgagatgttttggtcccatgtgcacacattatacgcagatggtttgggccacttccaatcggataggatgcgcaattcatgcttgccaaaacatgaatgtttggggatctgtgtggcgacgtgcagtttacttggtatgcaactatgccccaaagggcaattggattggagaagcaccatataaagtaggggtaccatgttcatcttgtcctccaagttatgggggatcttgtactgacaatctgtgttttccaggagttacgtcaaactacctgtactggtttaaataa

SEQ ID NO: 4 - DNA, 777 bp, Homo sapiens
atgatagcaatctctgccgtcagcagtgcactcctgttctcccttctctgtgaagcaagtaccgtcgtcctactcaattccactgactcatccccgccaaccaataatttcactgatattgaagcagctctgaaagcacaattagattcagcggatatccccaaagccaggcggaagcgctacatttcgcagaatgacatgatcgccattcttgattatcataatcaagttcggggcaaagtgttcccaccggcagcaaatatggaatatatggtttgggatgaaaatcttgcaaaatcggcagaggcttgggcggctacttgcatttgggaccatggaccttcttacttactgagatttttgggccaaaatctatctgtacgcactggaagatatcgctctattctccagttggtcaagccatggtatgatgaagtgaaagattatgcttttccatatccccaggattgcaaccccagatgtcctatgagatgttttggtcccatgtgcacacattatacgcagatggtttgggccacttccaatcggataggatgcgcaattcatacttgccaaaacatgaatgtttggggatctgtgtggcgacgtgcagtttacttggtatgcaactatgccccaaagggcaattggattggagaagcaccatataaagtaggggtaccatgttcatcttgtcctccaagttatgggggatcttgtactgacaatctgtgttttccaggagttacgtcaaactacctgtactggtttaaataa

SEQ ID NO: 5 - protein, 258 aa, Homo sapiens
MIAISAVSSALLFSLLCEASTVVLLNSTDSSPPTNNFTDIEAALKAQLDSADIPKARRKRYISQNDMIAILDYHNQVRGKVFPPAANMEYMVWDENLAKSAEAWAATCIWDHGPSYLLRFLGQNLSVRTGRYRSILQLVKPWYDEVKDYAFPYPQDCNPRCPMRCFGPMCTHYTQMVWATSNRIGCAIHACQNMNVWGSVWRRAVYLVCNYAPKGNWIGEAPYKVGVPCSSCPPSYGGSCTDNLCFPGVTSNYLYWFK

SEQ ID NO: 6 - protein, 258 aa, Homo sapiens
MIAISAVSSALLFSLLCEASTVVLLNSTDSSPPTNNFTDIEAALKAQLDSADIPKARRKRYISQNDMIAILDYHNQVRGKVFPPAANMEYMVWDENLAKSAEAWAATCIWDHGPSYLLRFLGQNLSVRTGRYRSILQLVKPWYDEVKDYAFPYPQDCNPRCPMRCFGPMCTHYTQMVWATSNRIGCAIHTCQNMNVWGSVWRRAVYLVCNYAPKGNWIGEAPYKVGVPCSSCPPSYGGSCTDNLCFPGVTSNYLYWFK

SEQ ID NO: 7 - DNA, 2820 bp, Homo sapiens
ggcgggttcgcgccccgaaggctgagagctggcgctgctcgtgccctgtgtgccagacggcggagctccgcggccggaccccgcggccccgctttgctgccgactggagtttgggggaagaaactctcctgcgccccagaagatttcttcctcggcgaagggacagcgaaagatgagggtggcaggaagagaaggcgctttctgtctgccggggtcgcagcgcgagagggcagtgccatgttcctctccatcctagtggcgctgtgcctgtggctgcacctggcgctgggcgtgcgcggcgcgccctgcgaggcggtgcgcatccctatgtgccggcacatgccctggaacatcacgcggatgcccaaccacctgcaccacagcacgcaggagaacgccatcctggccatcgagcagtacgaggagctggtggacgtgaactgcagcgccgtgctgcgcttcttcttctgtgccatgtacgcgcccatttgcaccctggagttcctgcacgaccctatcaagccgtgcaagtcggtgtgccaacgcgcgcgcgacgactgcgagcccctcatgaagatgtacaaccacagctggcccgaaagcctggcctgcgacgagctgcctgtctatgaccgtggcgtgtgcatttcgcctgaagccatcgtcacggacctcccggaggatgttaagtggatagacatcacaccagacatgatggtacaggaaaggcctcttgatgttgactgtaaacgcctaagccccgatcggtgcaagtgtaaaaaggtgaagccaactttggcaacgtatctcagcaaaaactacagctatgttattcatgccaaaataaaagctgtgcagaggagtggctgcaatgaggtcacaacggtggtggatgtaaaagagatcttcaagtcctcatcacccatccctcgaactcaagtcccgctcattacaaattcttcttgccagtgtccacacatcctgccccatcaagatgttctcatcatgtgttacgagtggcgttcaaggatgatgcttcttgaaaattgcttagttgaaaaatggagagatcagcttagtaaaagatccatacagtgggaagagaggctgcaggaacagcggagaacagttcaggacaagaagaaaacagccgggcgcaccagtcgtagtaatccccccaaaccaaagggaaagcctcctgctcccaaaccagccagtcccaagaagaacattaaaactaggagtgcccagaagagaacaaacccgaaaagagtgtgagctaactagtttccaaagcggagacttccgacttccttacaggatgaggctgggcattgcctgggacagcctatgtaaggccatgtgccccttgccctaacaactcactgcagtgctcttcatagacacatcttgcagcatttttcttaaggctatgcttcagtttttctttgtaagccatcacaagccatagtggtaggtttgccctttggtacagaaggtgagttaaagctggtggaaaaggcttattgcattgcattcagagtaacctgtgtgcatactctagaagagtagggaaaataatgcttgttacaattcgacctaatatgtgcattgtaaaataaatgccatatttcaaacaaaacacgtaatttttttacagtatgttttattaccttttgatatctgttgttgcaatgttagtgatgttttaaaatgtgatgaaaatataatgtttttaagaaggaacagtagtggaatgaatgttaaaagatctttatgtgtttatggtctgcagaaggatttttgtgatgaaaggggattttttgaaaaattagagaagtagcatatggaaaattataatgtgtttttttaccaatgacttcagtttctgtttttagctagaaacttaaaaacaaaaataataataaagaaaaataaataaaaaggagaggcagacaatgtctggattcctgttttttggttacctgatttccatgatcatgatgcttcttgtcaacaccctcttaagcagcaccagaaacagtgagtttgtctgtaccattaggagttaggtactaattagttggctaatgctcaagtattttatacccacaagagaggtatgtcactcatcttacttcccaggacatccaccctgagaataatttgacaagcttaaaaatggccttcatgtgagtgccaaattttgtttttcttcatttaaatattttctttgcctaaatacatgtgagaggagttaaatataaatgtacagagaggaaagttgagttccacctctgaaatgagaattacttgacagttgggatactttaatcagaaaaaaagaacttatttgcagcattttatcaacaaatttcataattgtggacaattggaggcatttattttaaaaaacaattttattggccttttgctaacacagtaagcatgtattttataaggcattcaataaatgcacaacgcccaaaggaaataaaatcctatctaatcctactctccactacacagaggtaatcactattagtattttggcatattattctccaggtgtttgcttatgcacttataaaatgatttgaacaaataaaactaggaacctgtatacatgtgtttcataacctgcctcctttgcttggccctttattgagataagttttcctgtcaagaaagcagaaaccatctcatttctaacagctgtgttatattccatagtatgcattactcaacaaactgttgtgctattggatacttaggtggtttcttcactgacaatactgaataaacatctcaccggaattc

SEQ ID NO: 8 - protein, 346 aa, Homo sapiens
MFLSILVALCLWLHLALGVRGAPCEAVRIPMCRHMPWNITRMPNHLHHSTQENAILAIEQYEELVDVNCSAVLRFFFCAMYAPICTLEFLHDPIKPCKSVCQRARDDCEPLMKMYNHSWPESLACDELPVYDRGVCISPEAIVTDLPEDVKWIDITPDMMVQERPLDVDCKRLSPDRCKCKKVKPTLATYLSKNYSYVIHAKIKAVQRSGCNEVTTVVDVKEIFKSSSPIPRTQVPLITNSSCQCPHILPHQDVLIMCYEWRSRMMLLENCLVEKWRDQLSKRSIQWEERLQEQRRTVQDKKKTAGRTSRSNPPKPKGKPPAPKPASPKKNIKTRSAQKRTNPKRV

SEQ ID NO: 9 - DNA, 381 bp, Homo sapiens
gtccttcctctcctagcctaaggcgtgcaaacagagcgccactgggaggctgaaacctttaggccgatgcttgcttgcaaggtcaggcaagctggattctggtccccacctttgcagagagaacagcgatgttgtgcgcccatttctcagatcaaggaccggcccatcttactacctccaagagtgcttttctctctaataagaaaacatctactttgaaacatctactgggcgagaccaggagtgatggctcagcctgtaattctggaatttcgggaggccgaggcaggaagattccttgagcacaggagttccagaccagcctgggcaatgtagcaagacgctgtctctatttatacaataaaatttttttaaaaaagg

SEQ ID NO: 10 - protein, 57 aa, Homo sapiens
MLCAHFSDQGPAHLTTSKSAFLSNKKTSTLKHLLGETRSDGSACNSGISGGRGRKIP

SEQ ID NO: 11 - DNA, 1141 bp, Homo sapiens
tccttgggttcgggtgaaagcgcctgggggttcgtggccatgatccccgagctgctggagaactgaaggcggacagtctcctgcgaaaccaggcaatggcggagctggagtttgttcagatcatcatcatcgtggtggtgatgatggtgatggtggtggtgatcacgtgcctgctgagccactacaagctgtctgcacggtccttcatcagccggcacagccaggggcggaggagagaagatgccctgtcctcagaaggatgcctgtggccctcggagagcacagtgtcaggcaacggaatcccagagccgcaggtctacgccccgcctcggcccaccgaccgcctggccgtgccgcccttcgcccagcgggagcgcttccaccgcttccagcccacctatccgtacctgcagcacgagatcgacctgccacccaccatctcgctgtcagacggggaggagcccccaccctaccagggcccctgcaccctccagcttcgggaccccgagcagcagctggaactgaaccgggagtcggtgcgcgcacccccaaacagaaccatcttcgacagtgacctgatggatagtgccaggctgggcggcccctgcccccccagcagtaactcgggcatcagcgccacgtgctacggcagcggcgggcgcatggaggggccgccgcccacctacagcgaggtcatcggccactacccggggtcctccttccagcaccagcagagcagtgggccgccctccttgctggaggggacccggctccaccacacacacatcgcgcccctagagagcgcagccatctggagcaaagagaaggataaacagaaaggacaccctctctagggtccccaggggggccgggctggggctgcgtaggtgaaaaggcagaacactccgcgcttcttagaagaggagtgagaggaaggcggggggcgcagcaacgcatcgtgtggccctcccctcccacctccctgtgtataaatatttacatgtgatgtctggtctgaatgcacaagctaagagagcttgcaaaaaaaaaaagaaaaaagaaaaaaaaaaaccacgtttctttgttgagctgtgtcttgaaggcaaaagaaaaaaaatttctacagtaaaaaaaaaaaaaa

SEQ ID NO: 12 - protein, 252 aa, Homo sapiens
MAELEFVQIIIIVVVMMVMVVVITCLLSHYKLSARSFISRHSQGRRREDALSSEGCLWPSESTVSGNGIPEPQVYAPPRPTDRLAVPPFAQRERFHRFQPTYPYLQHEIDLPPTISLSDGEEPPPYQGPCTLQLRDPEQQLELNRESVRAPPNRTIFDSDLMDSARLGGPCPPSSNSGISATCYGSGGRMEGPPPTYSEVIGHYPGSSFQHQQSSGPPSLLEGTRLHHTHIAPLESAAIWSKEKDKQKGHPL

SEQ ID NO: 13 - DNA, 1807 bp, Homo sapiens
gcacgagggaagagggtgatccgacccggggaaggtcgctgggcagggcgagttgggaaagcggcagcccccgccgcccccgcagccccttctcctcctttctcccacgtcctatctgcctctcgctggaggccaggccgtgcagcatcgaagacaggaggaactggagcctcattggccggcccggggcgccggcctcgggcttaaataggagctccgggctctggctgggacccgaccgctgccggccgcgctcccgctgctcctgccgggtgatggaaaaccccagcccggccgccgccctgggcaaggccctctgcgctctcctcctggccactctcggcgccgccggccagcctcttgggggagagtccatctgttccgccagagccccggccaaatacagcatcaccttcacgggcaagtggagccagacggccttccccaagcagtaccccctgttccgcccccctgcgcagtggtcttcgctgctgggggccgcgcatagctccgactacagcatgtggaggaagaaccagtacgtcagtaacgggctgcgcgactttgcggagcgcggcgaggcctgggcgctgatgaaggagatcgaggcggcgggggaggcgctgcagagcgtgcacgcggtgttttcggcgcccgccgtccccagcggcaccgggcagacgtcggcggagctggaggtgcagcgcaggcactcgctggtctcgtttgtggtgcgcatcgtgcccagccccgactggttcgtgggcgtggacagcctggacctgtgcgacggggaccgttggcgggaacaggcggcgctggacctgtacccctacgacgccgggacggacagcggcttcaccttctcctcccccaacttcgccaccatcccgcaggacacggtgaccgagataacgtcctcctctcccagccacccggccaactccttctactacccgcggctgaaggccctgcctcccatcgccagggtgacactggtgcggctgcgacagagccccagggccttcatccctcccgccccagtcctgcccagcagggacaatgagattgtagacagcgcctcagttccagaaacgccgctggactgcgaggtctccctgtggtcgtcctggggactgtgcggaggccactgtgggaggctcgggaccaagagcaggactcgctacgtccgggtccagcccgccaacaacgggagcccctgccccgagctcgaagaagaggctgagtgcgtccctgataactgcgtctaagaccagagccccgcagcccctggggcccccggagccatggggtgtcgggggctcctgtgcaggctcatgctgcaggcggccgaggcacagggggtttcgcgctgctcctgaccgcggtgaggccgcgccgaccatctctgcactgaagggccctctggtggccggcacgggcattgggaaacagcctcctcctttcccaaccttgcttcttaggggcccccgtgtcccgtctgctctcagcctcctcctcctgcaggataaagtcatccccaaggctccagctactctaaattatggtctccttataagttattgctgctccaggagattgtccttcatcgtccaggggcctggctcccacgtggttgcagatacctcagacctggtgctctaggctgtgctgagcccactctcccgagggcgcatccaagcgggggccacttgagaagtgaataaatggggcggtttcggaagcgtcagtgtttccatgttatggatctctctgcgtttgaataaagactatctctgttgctcac

SEQ ID NO: 14 - protein, 331 aa, Homo sapiens
MENPSPAAALGKALCALLLATLGAAGQPLGGESICSARAPAKYSITFTGKWSQTAFPKQYPLFRPPAQWSSLLGAAHSSDYSMWRKNQYVSNGLRDFAERGEAWALMKEIEAAGEALQSVHAVFSAPAVPSGTGQTSAELEVQRRHSLVSFVVRIVPSPDWFVGVDSLDLCDGDRWREQAALDLYPYDAGTDSGFTFSSPNFATIPQDTVTEITSSSPSHPANSFYYPRLKALPPIARVTLVRLRQSPRAFIPPAPVLPSRDNEIVDSASVPETPLDCEVSLWSSWGLCGGHCGRLGTKSRTRYVRVQPANNGSPCPELEEEAECVPDNCV

SEQ ID NO: 15 - DNA, 786 bp, Homo sapiens
cgggcgaagcagcgcgggcagcgagatgcagcaccgaggcttcctcctcctcaccctcctcgccctgctggcgctcacctccgcggtcgccaaaaagaaagataaggtgaagaagggcggcccggggagcgagtgcgctgagtgggcctgggggccctgcacccccagcagcaaggattgcggcgtgggtttccgcgagggcacctgcggggcccagacccagcgcatccggtgcagggtgccctgcaactggaagaaggagtttggagccgactgcaagtacaagtttgagaactggggtgcgtgtgatgggggcacaggcaccaaagtccgccaaggcaccctgaagaaggcgcgctacaatgctcagtgccaggagaccatccgcgtcaccaagccctgcacccccaagaccaaagcaaaggccaaagccaagaaagggaagggaaaggactagacgccaagcctggatgccaaggagcccctggtgtcacatggggcctggccacgccctccctctcccaggcccgagatgtgacccaccagtgccttctgtctgctcgttagctttaatcaatcatgccctgccttgtccctctcactccccagccccacccctaagtgcccaaagtggggagggacaagggattctgggaagcttgagcctcccccaaagcaatgtgagtcccagagcccgcttttgttcttccccacaattccattactaagaaacacatcaaataaactgactttttccccccaataaaagctcttcttttttaatat

SEQ ID NO: 16 - protein, 143 aa, Homo sapiens
MQHRGFLLLTLLALLALTSAVAKKKDKVKKGGPGSECAEWAWGPCTPSSKDCGVGFREGTCGAQTQRIRCRVPCNWKKEFGADCKYKFENWGACDGGTGTKVRQGTLKKARYNAQCQETIRVTKPCTPKTKAKAKAKKGKGKD

SEQ ID NO: 17 - DNA, 1617 bp, Homo sapiens
atggtagaactagtgatctcacccagcctcactgtaaacagcgattgtctggataaactgaagtttaaccgtgctgacgctgctgtgtggactctgagtgacagacaaggcatcaccaaatcggcccccctgagagtgtcccagctcttctccagatcttgcccacgtgtcctcccccgccagccttccacagccatggcagcctacggccagacgcagtacagtgcggggatccagcaggctaccccctatacagcttacccacctccagcacaagcctatggaatcccttcctacagcatcaagacagaagacagcttgaaccattcccctggccagagtggattcctcagctatggctccagcttcagcacctcacccactggacagagcccatacacctaccagatgcacggcacaacagggttctatcaaggaggaaatggactgggcaacgcagccggtttcgggagtgtgcaccaggactatccttcctaccccggcttcccccagagccagtacccccagtattacggctcatcctacaaccctccctacgtcccggccagcagcatctgcccttcgcccctctccacgtccacctacgtcctccaggaggcatctcacaacgtccccaaccagagttccgagtcacttgctggtgaatacaacacacacaatggaccttccacaccagcgaaagagggagacacagacaggccgcaccgggcctccgacgggaagctccgaggccggtctaagaggagcagtgacccgtccccggcaggggacaatgagattgagcgtgtgttcgtgtgggacttggatgagacaataattatttttcactccttactcacggggacatttgcatccagatacgggaaggacaccacgacgtccgtgcgcattggccttatgatggaagagatgatcttcaaccttgcagatacacatctgttcttcaatgacctggaggattgtgaccagatccacgttgatgacgtctcatcagatgacaatggccaagatttaagcacatacaacttctccgctgacggcttccacagttcggccccaggagccaacctgtgcctgggctctggcgtgcacggcggcgtggactggatgaggaagctggccttccgctaccggcgggtgaaggagatgtacaatacctacaagaacaacgttggtgggttgataggcactcccaaaagggagacctggctacagctccgagctgagctggaagctctcacagacctctggctgacccactccctgaaggcactaaacctcatcaactcccggcccaactgtgtcaatgtgctggtcaccaccactcaactaattcctgccctggccaaagtcctgctatatggcctggggtctgtgtttcctattgagaacatctacagtgcaaccaagacagggaaggagagctgcttcgagaggataatgcagagattcggcagaaaagctgtctacgtggtgatcggtgatggtgtggaagaggagcaaggagcgaaaaagcacaacatgcctttctggcggatatcctgccacgcagacctggaggcactgaggcacgccctggaactggagtatttatag

SEQ ID NO: 18 - protein, 538 aa, Homo sapiens
MVELVISPSLTVNSDCLDKLKFNRADAAVWTLSDRQGITKSAPLRVSQLFSRSCPRVLPRQPSTAMAAYGQTQYSAGIQQATPYTAYPPPAQAYGIPSYSIKTEDSLNHSPGQSGFLSYGSSFSTSPTGQSPYTYQMHGTTGFYQGGNGLGNAAGFGSVHQDYPSYPGFPQSQYPQYYGSSYNPPYVPASSICPSPLSTSTYVLQEASHNVPNQSSESLAGEYNTHNGPSTPAKEGDTDRPHRASDGKLRGRSKRSSDPSPAGDNEIERVFVWDLDETIIIFHSLLTGTFASRYGKDTTTSVRIGLMMEEMIFNLADTHLFFNDLEDCDQIHVDDVSSDDNGQDLSTYNFSADGFHSSAPGANLCLGSGVHGGVDWMRKLAFRYRRVKEMYNTYKNNVGGLIGTPKRETWLQLRAELEALTDLWLTHSLKALNLINSRPNCVNVLVTTTQLIPALAKVLLYGLGSVFPIENIYSATKTGKESCFERIMQRFGRKAVYVVIGDGVEEEQGAKKHNMPFWRISCHADLEALRHALELEYL

SEQ ID NO: 19 - DNA, 2261 bp, Homo sapiens
ccgcggttccggctgctccggcgaggcgacccttgggtcggcgctgcgggcgaggtgggcaggtaggtgggcggacggccgcggttctccggcaagcgcaggcggcggagtcccccacggcgcccgaagcgccccccgcacccccggcctccagcgttgaggcgggggagtgaggagatgccgacccagagggacagcagcaccatgtcccacacggtcgcaggcggcggcagcggggaccattcccaccaggtccgggtgaaagcctactaccgcggggatatcatgataacacattttgaaccttccatctcctttgagggcctttgcaatgaggttcgagacatgtgttcttttgacaacgaacagctcttcaccatgaaatggatagatgaggaaggagacccgtgtacagtatcatctcagttggagttagaagaagcctttagactttatgagctaaacaaggattctgaactcttgattcatgtgttcccttgtgtaccagaacgtcctgggatgccttgtccaggagaagataaatccatctaccgtagaggtgcacgccgctggagaaagctttattgtgccaatggccacactttccaagccaagcgtttcaacaggcgtgctcactgtgccatctgcacagaccgaatatggggacttggacgccaaggatataagtgcatcaactgcaaactcttggttcataagaagtgccataaactcgtcacaattgaatgtgggcggcattctttgccacaggaaccagtgatgcccatggatcagtcatccatgcattctgaccatgcacagacagtaattccatataatccttcaagtcatgagagtttggatcaagttggtgaagaaaaagaggcaatgaacaccagggaaagtggcaaagcttcatccagtctaggtcttcaggattttgatttgctccgggtaataggaagaggaagttatgccaaagtactgttggttcgattaaaaaaaacagatcgtatttatgcaatgaaagttgtgaaaaaagagcttgttaatgatgatgaggatattgattgggtacagacagagaagcatgtgtttgagcaggcatccaatcatcctttccttgttgggctgcattcttgctttcagacagaaagcagattgttctttgttatagagtatgtaaatggaggagacctaatgtttcatatgcagcgacaaagaaaacttcctgaagaacatgccagattttactctgcagaaatcagtctagcattaaattatcttcatgagcgagggataatttatagagatttgaaactggacaatgtattactggactctgaaggccacattaaactcactgactacggcatgtgtaaggaaggattacggccaggagatacaaccagcactttctgtggtactcctaattacattgctcctgaaattttaagaggagaagattatggtttcagtgttgactggtgggctcttggagtgctcatgtttgagatgatggcaggaaggtctccatttgatattgttgggagctccgataaccctgaccagaacacagaggattatctcttccaagttattttggaaaaacaaattcgcataccacgttctctgtctgtaaaagctgcaagtgttctgaagagttttcttaataaggaccctaaggaacgattgggttgtcatcctcaaacaggatttgctgatattcagggacacccgttcttccgaaatgttgattgggatatgatggagcaaaaacaggtggtacctccctttaaaccaaatatttctggggaatttggtttggacaactttgattctcagtttactaatgaacctgtccagctcactccagatgacgatgacattgtgaggaagattgatcagtctgaatttgaaggttttgagtatatcaatcctcttttgatgtctgcagaagaatgtgtctgatcctcatttttcaaccatgtattctactcatgttgccatttaatgcatggataaacttgctgcaagcctggatacaattaaccattttatatttgccacctacaaaaaaacacccaatatcttctcttgtagactatatgaatcaattattacatctgttttactatgaaaaaaaaattaatactactagcttccagacaatcatgtcaaaatttagttgaactggtttttcagtttttaaaaggcctacagatgagtaatgaagttaccttttttgtttaaaaaaaaaaaag

SEQ ID NO: 20 - protein, 587 aa, Homo sapiens
MSHTVAGGGSGDHSHQVRVKAYYRGDIMITHFEPSISFEGLCNEVRDMCSFDNEQLFTMKWIDEEGDPCTVSSQLELEEAFRLYELNKDSELLIHVFPCVPERPGMPCPGEDKSIYRRGARRWRKLYCANGHTFQAKRFNRRAHCAICTDRIWGLGRQGYKCINCKLLVHKKCHKLVTIECGRHSLPQEPVMPMDQSSMHSDHAQTVIPYNPSSHESLDQVGEEKEAMNTRESGKASSSLGLQDFDLLRVIGRGSYAKVLLVRLKKTDRIYAMKVVKKELVNDDEDIDWVQTEKHVFEQASNHPFLVGLHSCFQTESRLFFVIEYVNGGDLMFHMQRQRKLPEEHARFYSAEISLALNYLHERGIIYRDLKLDNVLLDSEGHIKLTDYGMCKEGLRPGDTTSTFCGTPNYIAPEILRGEDYGFSVDWWALGVLMFEMMAGRSPFDIVGSSDNPDQNTEDYLFQVILEKQIRIPRSLSVKAASVLKSFLNKDPKERLGCHPQTGFADIQGHPFFRNVDWDMMEQKQVVPPFKPNISGEFGLDNFDSQFTNEPVQLTPDDDDIVRKIDQSEFEGFEYINPLLMSAEECV

SEQ ID NO: 21 - DNA, 5011 bp, Homo sapiens
ccaggcggcgttgcggccccggccccggctccctgcgccgccgccgccgccgccgccgccgccgccgccgccgccgccagcgctagcgccagcagccgggcccgatcacccgccgcccggtgcccgccgccgcccgcgccagcaaccgggcccgatcacccgccgcccggtgcccgccgccgcccgcgccaccggcatggcgctccggggcttctgcagcgccgatggctccgacccgctctgggactggaatgtcacgtggaataccagcaaccccgacttcaccaagtgctttcagaacacggtcctcgtgtgggtgccttgtttttacctctgggcctgtttccccttctacttcctctatctctcccgacatgaccgaggctacattcagatgacacctctcaacaaaaccaaaactgccttgggatttttgctgtggatcgtctgctgggcagacctcttctactctttctgggaaagaagtcggggcatattcctggccccagtgtttctggtcagcccaactctcttgggcatcaccacgctgcttgctacctttttaattcagctggagaggaggaagggagttcagtcttcagggatcatgctcactttctggctggtagccctagtgtgtgccctagccatcctgagatccaaaattatgacagccttaaaagaggatgcccaggtggacctgtttcgtgacatcactttctacgtctacttttccctcttactcattcagctcgtcttgtcctgtttctcagatcgctcacccctgttctcggaaaccatccacgaccctaatccctgcccagagtccagcgcttccttcctgtcgaggatcaccttctggtggatcacagggttgattgtccggggctaccgccagcccctggagggcagtgacctctggtccttaaacaaggaggacacgtcggaacaagtcgtgcctgttttggtaaagaactggaagaaggaatgcgccaagactaggaagcagccggtgaaggttgtgtactcctccaaggatcctgcccagccgaaagagagttccaaggtggatgcgaatgaggaggtggaggctttgatcgtcaagtccccacagaaggagtggaacccctctctgtttaaggtgttatacaagacctttgggccctacttcctcatgagcttcttcttcaaggccatccacgacctgatgatgttttccgggccgcagatcttaaagttgctcatcaagttcgtgaatgacacgaaggccccagactggcagggctacttctacaccgtgctgctgtttgtcactgcctgcctgcagaccctcgtgctgcaccagtacttccacatctgcttcgtcagtggcatgaggatcaagaccgctgtcattggggctgtctatcggaaggccctggtgatcaccaattcagccagaaaatcctccacggtcggggagattgtcaacctcatgtctgtggacgctcagaggttcatggacttggccacgtacattaacatgatctggtcagcccccctgcaagtcatccttgctctctacctcctgtggctgaatctgggcccttccgtcctggctggagtggcggtgatggtcctcatggtgcccgtcaatgctgtgatggcgatgaagaccaagacgtatcaggtggcccacatgaagagcaaagacaatcggatcaagctgatgaacgaaattctcaatgggatcaaagtgctaaagctttatgcctgggagctggcattcaaggacaaggtgctggccatcaggcaggaggagctgaaggtgctgaagaagtctgcctacctgtcagccgtgggcaccttcacctgggtctgcacgccctttctggtggccttgtgcacatttgccgtctacgtgaccattgacgagaacaacatcctggatgcccagacagccttcgtgtctttggccttgttcaacatcctccggtttcccctgaacattctccccatggtcatcagcagcatcgtgcaggcgagtgtctccctcaaacgcctgaggatctttctctcccatgaggagctggaacctgacagcatcgagcgacggcctgtcaaagacggcgggggcacgaacagcatcaccgtgaggaatgccacattcacctgggccaggagcgaccctcccacactgaatggcatcaccttctccatccccgaaggtgctttggtggccgtggtgggccaggtgggctgcggaaagtcgtccctgctctcagccctcttggctgagatggacaaagtggaggggcacgtggctatcaagggctccgtggcctatgtgccacagcaggcctggattcagaatgattctctccgagaaaacatcctttttggatgtcagctggaggaaccatattacaggtccgtgatacaggcctgtgccctcctcccagacctggaaatcctgcccagtggggatcggacagagattggcgagaagggcgtgaacctgtctgggggccagaagcagcgcgtgagcctggcccgggccgtgtactccaacgctgacatttacctcttcgatgatcccctctcagcagtggatgcccatgtgggaaaacacatctttgaaaatgtgattggccccaaggggatgctgaagaacaagacgcggatcttggtcacgcacagcatgagctacttgccgcaggtggacgtcatcatcgtcatgagtggcggcaagatctctgagatgggctcctaccaggagctgctggctcgagacggcgccttcgctgagttcctgcgtacctatgccagcacagagcaggagcaggatgcagaggagaacggggtcacgggcgtcagcggtccagggaaggaagcaaagcaaatggagaatggcatgctggtgacggacagtgcagggaagcaactgcagagacagctcagcagctcctcctcctatagtggggacatcagcaggcaccacaacagcaccgcagaactgcagaaagctgaggccaagaaggaggagacctggaagctgatggaggctgacaaggcgcagacagggcaggtcaagctttccgtgtactgggactacatgaaggccatcggactcttcatctccttcctcagcatcttccttttcatgtgtaaccatgtgtccgcgctggcttccaactattggctcagcctctggactgatgaccccatcgtcaacgggactcaggagcacacgaaagtccggctgagcgtctatggagccctgggcatttcacaagggatcgccgtgtttggctactccatggccgtgtccatcggggggatcttggcttcccgctgtctgcacgtggacctgctgcacagcatcctgcggtcacccatgagcttctttgagcggacccccagtgggaacctggtgaaccgcttctccaaggagctggacacagtggactccatgatcccggaggtcatcaagatgttcatgggctccctgttcaacgtcattggtgcctgcatcgttatcctgctggccacgcccatcgccgccatcatcatcccgccccttggcctcatctacttcttcgtccagaggttctacgtggcttcctcccggcagctgaagcgcctcgagtcggtcagccgctccccggtctattcccatttcaacgagaccttgctgggggtcagcgtcattcgagccttcgaggagcaggagcgcttcatccaccagagtgacctgaaggtggacgagaaccagaaggcctattaccccagcatcgtggccaacaggtggctggccgtgcggctggagtgtgtgggcaactgcatcgttctgtttgctgccctgtttgcggtgatctccaggcacagcctcagtgctggcttggtgggcctctcagtgtcttactcattgcaggtcaccacgtacttgaactggctggttcggatgtcatctgaaatggaaaccaacatcgtggccgtggagaggctcaaggagtattcagagactgagaaggaggcgccctggcaaatccaggagacagctccgcccagcagctggccccaggtgggccgagtggaattccggaactactgcctgcgctaccgagaggacctggacttcgttctcaggcacatcaatgtcacgatcaatgggggagaaaaggtcggcatcgtggggcggacgggagctgggaagtcgtccctgaccctgggcttatttcggatcaacgagtctgccgaaggagagatcatcatcgatggcatcaacatcgccaagatcggcctgcacgacctccgcttcaagatcaccatcatcccccaggaccctgttttgttttcgggttccctccgaatgaacctggacccattcagccagtactcggatgaagaagtctggacgtccctggagctggcccacctgaaggacttcgtgtcagcccttcctgacaagctagaccatgaatgtgcagaaggcggggagaacctcagtgtcgggcagcgccagcttgtgtgcctagcccgggccctgctgaggaagacgaagatccttgtgttggatgaggccacggcagccgtggacctggaaacggacgacctcatccagtccaccatccggacacagttcgaggactgcaccgtcctcaccatcgcccaccggctcaacaccatcatggactacacaagggtgatcgtcttggacaaaggagaaatccaggagtacggcgccccatcggacctcctgcagcagagaggtcttttctacagcatggccaaagacgccggcttggtgtgagccccagagctggcatatctggtcagaactgcagggcctatatgccagcgcccagggaggagtcagtacccctggtaaaccaagcctcccacactgaaaccaaaacataaaaaccaaacccagacaaccaaaacatattcaaagcagcagccaccgccatccggtcccctgcctggaactggctgtgaagacccaggagagacagagatgcgaaccacc

SEQ ID NO: 22 - protein, 1531 aa, Homo sapiens
MALRGFCSADGSDPLWDWNVTWNTSNPDFTKCFQNTVLVWVPCFYLWACFPFYFLYLSRHDRGYIQMTPLNKTKTALGFLLWIVCWADLFYSFWERSRGIFLAPVFLVSPTLLGITTLLATFLIQLERRKGVQSSGIMLTFWLVALVCALAILRSKIMTALKEDAQVDLFRDITFYVYFSLLLIQLVLSCFSDRSPLFSETIHDPNPCPESSASFLSRITFWWITGLIVRGYRQPLEGSDLWSLNKEDTSEQVVPVLVKNWKKECAKTRKQPVKVVYSSKDPAQPKESSKVDANEEVEALIVKSPQKEWNPSLFKVLYKTFGPYFLMSFFFKAIHDLMMFSGPQILKLLIKFVNDTKAPDWQGYFYTVLLFVTACLQTLVLHQYFHICFVSGMRIKTAVIGAVYRKALVITNSARKSSTVGEIVNLMSVDAQRFMDLATYINMIWSAPLQVILALYLLWLNLGPSVLAGVAVMVLMVPVNAVMAMKTKTYQVAHMKSKDNRIKLMNEILNGIKVLKLYAWELAFKDKVLAIRQEELKVLKKSAYLSAVGTFTWVCTPFLVALCTFAVYVTIDENNILDAQTAFVSLALFNILRFPLNILPMVISSIVQASVSLKRLRIFLSHEELEPDSIERRPVKDGGGTNSITVRNATFTWARSDPPTLNGITFSIPEGALVAVVGQVGCGKSSLLSALLAEMDKVEGHVAIKGSVAYVPQQAWIQNDSLRENILFGCQLEEPYYRSVIQACALLPDLEILPSGDRTEIGEKGVNLSGGQKQRVSLARAVYSNADIYLFDDPLSAVDAHVGKHIFENVIGPKGMLKNKTRILVTHSMSYLPQVDVIIVMSGGKISEMGSYQELLARDGAFAEFLRTYASTEQEQDAEENGVTGVSGPGKEAKQMENGMLVTDSAGKQLQRQLSSSSSYSGDISRHHNSTAELQKAEAKKEETWKLMEADKAQTGQVKLSVYWDYMKAIGLFISFLSIFLFMCNHVSALASNYWLSLWTDDPIVNGTQEHTKVRLSVYGALGISQGIAVFGYSMAVSIGGILASRCLHVDLLHSILRSPMSFFERTPSGNLVNRFSKELDTVDSMIPEVIKMFMGSLFNVIGACIVILLATPIAAIIIPPLGLIYFFVQRFYVASSRQLKRLESVSRSPVYSHFNETLLGVSVIRAFEEQERFIHQSDLKVDENQKAYYPSIVANRWLAVRLECVGNCIVLFAALFAVISRHSLSAGLVGLSVSYSLQVTTYLNWLVRMSSEMETNIVAVERLKEYSETEKEAPWQIQETAPPSSWPQVGRVEFRNYCLRYREDLDFVLRHINVTINGGEKVGIVGRTGAGKSSLTLGLFRINESAEGEIIIDGINIAKIGLHDLRFKITIIPQDPVLFSGSLRMNLDPFSQYSDEEVWTSLELAHLKDFVSALPDKLDHECAEGGENLSVGQRQLVCLARALLRKTKILVLDEATAAVDLETDDLIQSTIRTQFEDCTVLTIAHRLNTIMDYTRVIVLDKGEIQEYGAPSDLLQQRGLFYSMAKDAGLV

SEQ ID NO: 23 - DNA, 1290 bp, Homo sapiens
atggccggctctggcgcgtggaagcgcctcaaatctatgctaaggaaggatgatgcgccgctgtttttaaatgacaccagcgcctttgacttctcggatgaggcgggggacgaggggctttctcggttcaacaaacttcgagttgtggtggccgatgacggttccgaagccccggaaaggcctgttaacggggcgcacccgaccctccaggccgacgatgattccttactggaccaagacttacctttgaccaacagtcagctgagtttgaaggtggactcctgtgacaactgcagcaaacagagagagatactgaagcagagaaaggtgaaagccaggttgaccattgctgccgttctgtacttgcttttcatgattggagaacttgtaggtggatacattgcaaatagcctagcaatcatgacagatgcacttcatatgttaactgacctaagcgccatcatactcaccctgcttgctttgtggctatcatcaaaatcaccaaccaaaagattcacctttggatttcatcgcttagaggttttgtcagctatgattagtgtgctgttggtgtatatacttatgggattcctcttatatgaagctgtgcaaagaactatccatatgaactatgaaataaatggagatataatgctcatcaccgcagctgttggagttgcagttaatgtaataatggggtttctgttgaaccagtctggtcaccgtcactcccattcccactccctgccttcaaattcccctaccagaggttctgggtgtgaacgtaaccatgggcaggatagcctggcagtgagagctgcatttgtacatgctttgggagatttggtacagagtgttggtgtgctaatagctgcatacatcatacgattcaagccagaatacaagattgctgatcccatctgtacatacgtattttcattacttgtggcttttacaacatttcgaatcatatgggatacagtagttataatactagaaggtgtgccaagccatttgaatgtagactatatcaaagaagccttgatgaaaatagaagatgtatattcagtcgaagatttaaatatctggtctctcacttcaggaaaatctactgccatagttcacatacagctaattcctggaagttcatctaaatgggaggaagtacagtccaaagcaaaccatttattattgaacacatttggcatgtatagatgtactattcagcttcagagttacaggcaagaagtggacagaacttgtgcaaattgtcagagttctagtccctga

SEQ ID NO: 24 - protein, 429 aa, Homo sapiens
MAGSGAWKRLKSMLRKDDAPLFLNDTSAFDFSDEAGDEGLSRFNKLRVVVADDGSEAPERPVNGAHPTLQADDDSLLDQDLPLTNSQLSLKVDSCDNCSKQREILKQRKVKARLTIAAVLYLLFMIGELVGGYIANSLAIMTDALHMLTDLSAIILTLLALWLSSKSPTKRFTFGFHRLEVLSAMISVLLVYILMGFLLYEAVQRTIHMNYEINGDIMLITAAVGVAVNVIMGFLLNQSGHRHSHSHSLPSNSPTRGSGCERNHGQDSLAVRAAFVHALGDLVQSVGVLIAAYIIRFKPEYKIADPICTYVFSLLVAFTTFRIIWDTVVIILEGVPSHLNVDYIKEALMKIEDVYSVEDLNIWSLTSGKSTAIVHIQLIPGSSSKWEEVQSKANHLLLNTFGMYRCTIQLQSYRQEVDRTCANCQSSSP

SEQ ID NO: 25 - DNA, 4526 bp, Homo sapiens
gccgagtcggtggcggctgcaggctgggagggagaagtgctacgcctttgcaggttggcgaagtggttccaggctacccggctagtctggcacggccccgtcttctgcctcctcctccgtcgcgtggcggcgggaactgttggccgcgcggcctcgggaacggcccaggtccccgcccgcaggtcccgggcagataacatagatcatcagtagaaaacttcttgaagttgttcaagaaaaatttgaaagtagcaaaatagaaaataaagaattaacagcagatacagaggacagcatggaagtgttgtcttaggaaacagaacacagcagtgaaaaaacagacaaaatccgctcagatacaactgcagctgataatgttttccggcttcaatgtctttagagttgggatctcttttgtcataatgtgcattttttacatgccaacagtaaactctttaccagaactgagtcctcagaaatattttagtacattgcaaccaggtcttgaagaactgaatgaggctgttagacctctgcaggactatggaatttcagttgccaaggttaattgtgtcaaagaagaaatatcaagatactgtggaaaagaaaaggatttgatgaaagcatatttattcaagggcaacatattgctcagagaattccctactgacaccttgtttgatgtgaatgccattgtcgcccatgttctctttgctcttctttttagtgaagtgaaatatattaccaacctggaagaccttcagaacatagaaaatgctctgaaaggaaaagcaaatattatattctcatatgtaagagccattggaataccagagcacagagcagtcatggaagccggttttgtgtatgggactacataccaatttgtcttaaccacagaaattgcccttttggaaagtattggctctgaggatgtggaatatgcacatctctacttttttcattgtaaactagtcttggacttgacccagcaatgtagaagaacactaatggaacagccattgactacactgaacattcacctgtttattaagacaatgaaagcacctctgttgactgaagttgctgaagatcctcaacaagtttcaactgtccatctccaactgggcttaccactggtttttattgttagccaacaggctacttatgaagctgatagaagaactgcagaatgggttgcttggcgtcttctgggaaaagcaggagttctactcttgttaagggactctttggaagtgaacattcctcaagatgctaatgtggtcttcaaaagagcagaagagggagttccagtggaatttttggtattacatgatgttgatttaataatatctcatgtggaaaataatatgcacattgaggaaatacaagaagatgaagacaatgacatggaaggtccagatatagatgttcaggatgatgaagtggcagaaactgttttcagagataggaagagaaaattacctttggaacttacagtggaactaacagaagaaacatttaatgcaacagtgatggcttctgacagcatagtactcttctatgctggttggcaagcagtatccatggcatttttgcaatcctatattgatgtggcagttaaactgaaaggcacatctactatgcttcttactagaataaactgtgcagattggtctgatgtatgtactaagcaaaatgttactgaatttcctatcataaagatgtacaagaaaggcgagaacccagtatcttatgctggaatgttaggaaccaaagatctcctaaaatttatccagctcaacaggatttcatatccagtgaatataacatcgatccaagaagcagaagaatatttaagtggggaattatataaagacctcatcttgtattctagtgtgtcagtattgggactatttagtccaaccatgaaaacagcaaaagaagattttagtgaagcaggaaactacctaaaaggatatgttatcactggaatttattctgaagaagatgttttgctactgtcaaccaaatatgctgcaagtcttccagccctgctgcttgccagacacacagaaggcaaaatagagagcatcccactagctagcacacatgcacaagacatagttcaaataataacagatgcactactggaaatgtttccggaaatcactgtggaaaatcttcccagttatttcagacttcagaaaccattattgattttgttcagtgatggcactgtaaatcctcaatataaaaaagcaatattgacactggtaaagcagaaatacttggattcatttactccatgctggttaaatctaaagaatactccagtggggagaggaatcttgcgggcatattttgatcctctgcctccccttcctcttcttgttttggtgaatctgcattcaggtggccaagtatttgcatttccttcagaccaggctataattgaagaaaaccttgtattgtggctgaagaaattagaagcaggactagaaaatcatatcacaattttacctgctcaagaatggaaacctcctcttccagcttatgattttctaagtatgatagatgccgcaacatctcaacgtggcactaggaaagttcccaagtgtatgaaagaaacagatgtgcaggagaatgataaggaacaacatgaagataaatcggcagtcagaaaagaaccgattgaaactctgagaataaagcattggaatagaagtaattggtttaaagaagcagaaaaatcatttagacgtgataaagagttaggatgctcaaaagtgaactaattttatagggctgtggtttccaaaatttttttggcatgatagacttaatttatttccttaaagaataatattaaatcatttcaagtttgcagactagtgccatccaatagaattataatataagtcacatattttatttaaaattttctagtaactacattaaacaaagtaaaagtgagcagggcaaaataattttgatattacttttcacccagtagtatacccaaaatagcgaaatatagaaattattaatgagatattttacatccttttttgtaccaagtcttctaaatgcagtacatattttatacttactgcatttcttacttccgagtagccatatttcaagtgttcattgccacatgtggcctgtgactactgtattggacagttcagtactagacaaaaactagcataattaacttagttctagccatgatttctatttggattaaaattaaactctaatcacagttaactccacagtgcattcatgcagctgacagttatatttgttttattggagtcatgatattaaaatcagcgtttgtcaacctcaggggatatttagcaattgtcgggagacatttttgatgtcatgactagggcagttattgacatttagtgagtagaggccatggatcctgctaaataacctgcattggacagcgccccacaacaaagaattatcctgcccgaaatggtagtcgtgccaaggctgagtaaccttgtgttaaaagtaacctgtggcagactaggtttccagaatttcctggttctgctcacgtatcatgtttgaaaaaattttggctattaaagatatgtattagatggtcttatcctgattattacctggatacaacttgatcttttctaatattttcagaaagtgatgggataaccctagaagaggactcagaatgatatttatattttaagtgagtcttaaaacctcctcttatttctacaagttatatggctaaatttcagattgaacagggattcagcattctgccatctcctcatggaaagagaggctccctcatctgaagcgtctctgaaatctacccttgcaagcttcagacaaatcagttgatctccctgagccacacggcctcattctgtgagggagggaaagattagccaaagagttaattttcattccaaatcacttagctgttagactgatctgtttgtagcagttgtttgtctcatttttgctctgtgcattttttgagacatttgttgagaatattctatttggtgctctactgtatttttctttttaatatctacttgatatcttgttctttaaattttcttcacatatggtttgcctgatacaactgatttttataactgaaatttaaggaatctaacagctaaaactcagtaagtgcatmtatttccttataacatagacccgttgctactctcagcaccctctcctcaattttttttcctgtagcatgtgatgcctgattaaactcattttcatttgcttttatttctaatatgggaacaatgagagtgaactctaaatataggttgtagtaataaaacatcattagcctaattattagaaaatgctaattaagtaccagcacatagaaacatgaaattgcttagtcattgtacctttgtcagcaattttgacagtcattaatgtttgtcataattttaaataaagtgtctgggtttcagaataccttcaaaaaaaaaaaaaaa

SEQ ID NO: 26 - protein, 807 aa, Homo sapiens
MFSGFNVFRVGISFVIMCIFYMPTVNSLPELSPQKYFSTLQPGLEELNEAVRPLQDYGISVAKVNCVKEEISRYCGKEKDLMKAYLFKGNILLREFPTDTLFDVNAIVAHVLFALLFSEVKYITNLEDLQNIENALKGKANIIFSYVRAIGIPEHRAVMEAGFVYGTTYQFVLTTEIALLESIGSEDVEYAHLYFFHCKLVLDLTQQCRRTLMEQPLTTLNIHLFIKTMKAPLLTEVAEDPQQVSTVHLQLGLPLVFIVSQQATYEADRRTAEWVAWRLLGKAGVLLLLRDSLEVNIPQDANVVFKRAEEGVPVEFLVLHDVDLIISHVENNMHIEEIQEDEDNDMEGPDIDVQDDEVAETVFRDRKRKLPLELTVELTEETFNATVMASDSIVLFYAGWQAVSMAFLQSYIDVAVKLKGTSTMLLTRINCADWSDVCTKQNVTEFPIIKMYKKGENPVSYAGMLGTKDLLKFIQLNRISYPVNITSIQEAEEYLSGELYKDLILYSSVSVLGLFSPTMKTAKEDFSEAGNYLKGYVITGIYSEEDVLLLSTKYAASLPALLLARHTEGKIESIPLASTHAQDIVQIITDALLEMFPEITVENLPSYFRLQKPLLILFSDGTVNPQYKKAILTLVKQKYLDSFTPCWLNLKNTPVGRGILRAYFDPLPPLPLLVLVNLHSGGQVFAFPSDQAIIEENLVLWLKKLEAGLENHITILPAQEWKPPLPAYDFLSMIDAATSQRGTRKVPKCMKETDVQENDKEQHEDKSAVRKEPIETLRIKHWNRSNWFKEAEKSFRRDKELGCSKVN

SEQ ID NO: 27 - DNA, 1195 bp, Homo sapiens
ccgagactcacggtcaagctaaggcgaagagtgggtggctgaagccatactattttatagaattaatggaaagcagaaaagacatcacaaaccaagaagaactttggaaaatgaagcctaggagaaatttagaagaagacgattatttgcataaggacacgggagagaccagcatgctaaaaagacctgtgcttttgcatttgcaccaaacagcccatgctgatgaatttgactgcccttcagaacttcagcacacacaggaactctttccacagtggcacttgccaattaaaatagctgctattatagcatctctgacttttctttacactcttctgagggaagtaattcaccctttagcaacttcccatcaacaatatttttataaaattccaatcctggtcatcaacaaagtcttgccaatggtttccatcactctcttggcattggtttacctgccaggtgtgatagcagcaattgtccaacttcataatggaaccaagtataagaagtttccacattggttggataagtggatgttaacaagaaagcagtttgggcttctcagtttcttttttgctgtactgcatgcaatttatagtctgtcttacccaatgaggcgatcctacagatacaagttgctaaactgggcatatcaacaggtccaacaaaataaagaagatgcctggattgagcatgatgtttggagaatggagatttatgtgtctctgggaattgtgggattggcaatactggctctgttggctgtgacatctattccatctgtgagtgactctttgacatggagagaatttcactatattcagagcaagctaggaattgtttcccttctactgggcacaatacacgcattgatttttgcctggaataagtggatagatataaaacaatttgtatggtatacacctccaacttttatgatagctgttttccttccaattgttgtcctgatatttaaaagcatactattcctgccatgcttgaggaagaagatactgaagattagacatggttgggaagacgtcaccaaaattaacaaaactgagatatgttcccagttgtagaattactgtttacacacatttttgttcaatattgatatattttatcaccaacatttcaagtttgtatttgttaataaaatgattattcaaggaaaaaaaaaaaaaaaaaa

SEQ ID NO: 28 - protein, 339 aa, Homo sapiens
MESRKDITNQEELWKMKPRRNLEEDDYLHKDTGETSMLKRPVLLHLHQTAHADEFDCPSELQHTQELFPQWHLPIKIAAIIASLTFLYTLLREVIHPLATSHQQYFYKIPILVINKVLPMVSITLLALVYLPGVIAAIVQLHNGTKYKKFPHWLDKWMLTRKQFGLLSFFFAVLHAIYSLSYPMRRSYRYKLLNWAYQQVQQNKEDAWIEHDVWRMEIYVSLGIVGLAILALLAVTSIPSVSDSLTWREFHYIQSKLGIVSLLLGTIHALIFAWNKWIDIKQFVWYTPPTFMIAVFLPIVVLIFKSILFLPCLRKKILKIRHGWEDVTKINKTEICSQL

SEQ ID NO: 29 - DNA, 2541 bp, Homo sapiens
atgagttcctgcaacttcacacatgccacctttgtgcttattggtatcccaggattagagaaagcccatttctgggttggcttccccctcctttccatgtatgtagtggcaatgtttggaaactgcatcgtggtcttcatcgtaaggacggaacgcagcctgcacgctccgatgtacctctttctctgcatgcttgcagccattgacctggccttatccacatccaccatgcctaagatccttgcccttttctggtttgattcccgagagattagctttgaggcctgtcttacccagatgttctttattcatgccctctcagccattgaatccaccatcctgctggccatggcctttgaccgttatgtggccatctgccacccactgcgccatgctgcagtgctcaacaatacagtaacagcccagattggcatcgtggctgtggtccgcggatccctcttttttttcccactgcctctgctgatcaagcggctggccttctgccactccaatgtcctctcgcactcctattgtgtccaccaggatgtaatgaagttggcctatgcagacactttgcccaatgtggtatatggtcttactgccattctgctggtcatgggcgtggacgtaatgttcatctccttgtcctattttctgataatacgaacggttctgcaactgccttccaagtcagagcgggccaaggcctttggaacctgtgtgtcacacattggtgtggtactcgccttctatgtgccacttattggcctctcagtggtacaccgctttggaaacagccttcatcccattgtgcgtgttgtcatgggtgacatctacctgctgctgcctcctgtcatcaatcccatcatctatggtgccaaaaccaaacagatcagaacacgggtgctggctatgttcaagatcagctgtgacaaggacttgcaggctgtgggaggcaagtgacccttaacactacacttctccttatctttattggcttgataaacataattatttctaacactagcttatttccagttgcccataagcacatcagtacttttctctggctggaatagtaaactaaagtatggtacatctacctaaaggactattatgtggaataatacatactaatgaagtattacatgatttaaagactacaataaaaccaaacatgcttataacattaagaaaaacaataaagatacatgattgaaaccaagttgaaaaatagcatatgccttggaggaaatgtgctcaaattactaatgatttagtgttgtccctactttctctctcttttttctttcttttttttttattatggttagctgtcacatacaactttttttttttttgagatggggtctcgctctgtcaccaggctggagtgcagtggcgcgatctcggctcactgcaacctccacatcccatgttgaagtaattcttctgcctcagcctcccgagtagctgggactagaggaacgtgccaccatgactggctaattttctgtattttttagtagagacagagtttcaccatgttggccaggatggtctcgatctcctgaccttgtgatccacccgcctcagcctcccaaagtgttgggattacaggtgtgaaccactgtgcccggcctgtgtacaactttttaaatagggaatatgatagcttcgcatggtggtgtgcacctatagcccccactgcctggaaagctgaggtgggagaatcgcttgagtccaggagtttgaggttacagtgatccacgatcgtaccactacactccagcctgggcaacagagcaagaccctgtctcaaagcataaaatggaataacatatcaaatgaaacagggaaaatgaagctgacaatttatggaagccagggcttgtcacagtctctactgttattatgcattacctgggaatttatataagcccttaataatartgccaatgaacatctcatgtgtgctcacaatgttctggcactattataagtgcttcacaggttttatgtgttcttcgtaactttatggagtaggtaccatttgtgtctctttattataagtgagagaaatgaagtttatattatcaaggggactaaagtcacacggcttgtgggcactgtgccaagatttaaaattaaatttgatggttgaatacagttacttaatgaccatgttatattgcttcctgtgtaacatctgccatttatttcctcagctgtacaaatcctctgttttctctctgttacacactaacatcaatggctttgtacttgtgatgagagataaccttgccctagttgtgggcaacacatgcagaataatcctgttttacagctgcctttcgtgatcttattgcttgcttttttccagattcagggagaatgttgttgtctatttgtctcttacatctccttgatcatgtcttcattttttaatgtgctctgtacctgtcaaaaattttgaatgtacaccacatgctattgtctgaacttgagtataagataaaataaaattttattttaaatttt

SEQ ID NO: 30 - protein, 320 aa, Homo sapiens
MSSCNFTHATFVLIGIPGLEKAHFWVGFPLLSMYVVAMFGNCIVVFIVRTERSLHAPMYLFLCMLAAIDLALSTSTMPKILALFWFDSREISFEACLTQMFFIHALSAIESTILLAMAFDRYVAICHPLRHAAVLNNTVTAQIGIVAVVRGSLFFFPLPLLIKRLAFCHSNVLSHSYCVHQDVMKLAYADTLPNVVYGLTAILLVMGVDVMFISLSYFLIIRTVLQLPSKSERAKAFGTCVSHIGVVLAFYVPLIGLSVVHRFGNSLHPIVRVVMGDIYLLLPPVINPIIYGAKTKQIRTRVLAMFKISCDKDLQAVGGK

SEQ ID NO: 31 - DNA, 1018 bp, Homo sapiens
atgaactgggagctgctgctgtggctgctggtgctgtgcgcgctgctcctgctcttggtgcagctgctgcgcttcctgagggctgacggcgacctgacgctactatgggccgagtggcagggacgacgcccagaatgggagctgactgatatggtggtgtgggtgactggagcctcgagtggaattggtgaggagctggcttaccagttgtctaaactaggagtttctcttgtgctgtcagccagaagagtgcatgagctggaaagggtgaaaagaagatgcctagagaatggcaatttaaaagaaaaagatatacttgttttgccccttgacctgaccgacactggttcccatgaagcggctaccaaagctgttctccaggagtttggtagaatcgacattctggtcaacaatggtggaatgtcccagcgttctctgtgcatggataccagcttggatctacagaaagctaatagagcttaactacttagggacggtgtccttgacaaaatgtgttctgcctcacatgatcgagaggaagcaaggaaagattgttactgtgaatagcatcctgggtatcatatctgtacctctttccattggatactgtgctagcaagcatgctctccggggtttttttaatggccttcgaacagaacttgccacatacccaggtataatagtttctaacatttgcccaggacctgtgcaatcaaatattgtggagaattccctagctggagaagtcacaaagactataggcaataatggagaccagtcccacaagatgacaaccagtcgttgtgtgcggctgatgttaatcagcatggccaatgatttgaaagaagtttggatctcagaacaacctttcttgttagtaacatatttgtggcaatacatgccaacctgggcctggtggataaccaacaagatggggaagaaaaggattgagaactttaagagtggtgtggatgcagactcttcttattttaaaatctttaagacaaaacatgactga

SEQ ID NO: 32 - protein, 339 aa, Homo sapiens
MNWELLLWLLVLCALLLLLVQLLRFLRADGDLTLLWAEWQGRRPEWELTDMVVWVTGASSGIGEELAYQLSKLGVSLVLSARRVHELERVKRRCLENGNLKEKDILVLPLDLTDTGSHEAATKAVLQEFGRIDILVNNGGMSQRSLCMDTSLDVYRKLIELNYLGTVSLTKCVLPHMIERKQGKIVTVNSILGIISVPLSIGYCASKHALRGFFNGLRTELATYPGIIVSNICPGPVQSNIVENSLAGEVTKTIGNNGDQSHKMTTSRCVRLMLISMANDLKEVWISEQPFLLVTYLWQYMPTWAWWITNKMGKKRIENFKSGVDADSSYFKIFKTKHD

SEQ ID NO: 33 - DNA, 1186 bp, Homo sapiens
aggaatctgcgctcgggttccgcagatgcagaggttgaggtggctgcgggactggaagtcatcgggcagaggtctcacagcagccaaggaacctggggcccgctcctcccccctccaggccatgaggattctgcagttaatcctgcttgctctggcaacagggcttgtagggggagagaccaggatcatcaaggggttcgagtgcaagcctcactcccagccctggcaggcagccctgttcgagaagacgcggctactctgtggggcgacgctcatcgcccccagatggctcctgacagcagcccactgcctcaagccccgctacatagttcacctggggcagcacaacctccagaaggaggagggctgtgagcagacccggacagccactgagtccttcccccaccccggcttcaacaacagcctccccaacaaagaccaccgcaatgacatcatgctggtgaagatggcatcgccagtctccatcacctgggctgtgcgacccctcaccctctcctcacgctgtgtcactgctggcaccagctgcctcatttccggctggggcagcacgtccagcccccagttacgcctgcctcacaccttgcgatgcgccaacatcaccatcattgagcaccagaagtgtgagaacgcctaccccggcaacatcacagacaccatggtgtgtgccagcgtgcaggaagggggcaaggactcctgccagggtgactccgggggccctctggtctgtaaccagtctcttcaaggcattatctcctggggccaggatccgtgtgcgatcacccgaaagcctggtgtctacacgaaagtctgcaaatatgtggactggatccaggagacgatgaagaacaattagactggacccacccaccacagcccatcaccctccatttccacttggtgtttggttcctgttcactctgttaataagaaaccctaagccaagaccctctacgaacattctttgggcctcctggactacaggagatgctgtcacttaataatcaacctggggttcgaaatcagtgagacctggattcaaattctgccttgaaatattgtgactctgggaatgacaacacctggtttgttctctgttgtatccccagccccaaagacagctcctggccatatatcaaggtttcaataaatatttgctaaatgagtg

SEQ ID NO: 34 - protein, 250 aa, Homo sapiens
MRILQLILLALATGLVGGETRIIKGFECKPHSQPWQAALFEKTRLLCGATLIAPRWLLTAAHCLKPRYIVHLGQHNLQKEEGCEQTRTATESFPHPGFNNSLPNKDHRNDIMLVKMASPVSITWAVRPLTLSSRCVTAGTSCLISGWGSTSSPQLRLPHTLRCANITIIEHQKCENAYPGNITDTMVCASVQEGGKDSCQGDSGGPLVCNQSLQGIISWGQDPCAITRKPGVYTKVCKYVDWIQETMKNN

SEQ ID NO: 35 - DNA, 1233 bp, Homo sapiens
ctaaagctctcttgctgcctagcctcctgccggcctcatcttcgcccagccaaccccgcctggagccctatggccaactgcgagttcagcccggtgtccggggacaaaccctgctgccggctctctaggagagcccaactctgtcttggcgtcagtatcctggtcctgatcctcgtcgtggtgctcgcggtggtcgtcccgaggtggcgccagacgtggagcggtccgggcaccaccaagcgctttcccgagaccgtcctggcgcgatgcgtcaagtacactgaaattcatcctgagatgagacatgtagactgccaaagtgtatgggatgctttcaagggtgcatttatttcaaaacatccttgcaacattactgaagaagactatcagccactaatgaagttgggaactcagaccgtaccttgcaacaagattcttctttggagcagaataaaagatctggcccatcagttcacacaggtccagcgggacatgttcaccctggaggacacgctgctaggctaccttgctgatgacctcacatggtgtggtgaattcaacacttccaaaataaactatcaatcttgcccagactggagaaaggactgcagcaacaaccctgtttcagtattctggaaaacggtttcccgcaggtttgcagaagctgcctgtgatgtggtccatgtgatgctcaatggatcccgcagtaaaatctttgacaaaaacagcacttttgggagtgtggaagtccataatttgcaaccagagaaggttcagacactagaggcctgggtgatacatggtggaagagaagattccagagacttatgccaggatcccaccataaaagagctggaatcgattataagcaaaaggaatattcaattttcctgcaagaatatctacagacctgacaagtttcttcagtgtgtgaaaaatcctgaggattcatcttgcacatctgagatctgagccagtcgctgtggttgttttagctccttgactccttgtggtttatgtcatcatacatgactcagcatacctgctggtgcagagctgaagattttggagggtcctccacaataaggtcaatgccagagacggaagcctttttccccaaagtcttaaaataacttatatcatcagcatacctttattgtgatctatcaatagtcaagaaaaattattgtataagattagaatgaaaattgtatgttaagttacttcctttag

SEQ ID NO: 36 - protein, 300 aa, Homo sapiens
MANCEFSPVSGDKPCCRLSRRAQLCLGVSILVLILVVVLAVVVPRWRQTWSGPGTTKRFPETVLARCVKYTEIHPEMRHVDCQSVWDAFKGAFISKHPCNITEEDYQPLMKLGTQTVPCNKILLWSRIKDLAHQFTQVQRDMFTLEDTLLGYLADDLTWCGEFNTSKINYQSCPDWRKDCSNNPVSVFWKTVSRRFAEAACDVVHVMLNGSRSKIFDKNSTFGSVEVHNLQPEKVQTLEAWVIHGGREDSRDLCQDPTIKELESIISKRNIQFSCKNIYRPDKFLQCVKNPEDSSCTSEI

SEQ ID NO: 37 - DNA, 3315 bp, Homo sapiens
atgtcctttcgggcagccaggctcagcatgaggaacagaaggaatgacactctggacagcacccggaccctgtactccagcgcgtctcggagcacagacttgtcttacagtgaaagcgacttggtgaattttattcaagcaaattttaagaaacgagaatgtgtcttctttaccaaagattccaaggccacggagaatgtgtgcaagtgtggctatgcccagagccagcacatggaaggcacccagatcaaccaaagtgagaaatggaactacaagaaacacaccaaggaatttcctaccgacgcctttggggatattcagtttgagacactggggaagaaagggaagtatatacgtctgtcctgcgacacggacgcggaaatcctttacgagctgctgacccagcactggcacctgaaaacacccaacctggtcatttctgtgaccgggggcgccaagaacttcgccctgaagccgcgcatgcgcaagatcttcagccggctcatctacatcgcgcagtccaaaggtgcttggattctcacgggaggcacccattatggcctgatgaagtacatcggggaggtggtgagagataacaccatcagcaggagttcagaggagaatattgtggccattggcatagcagcttggggcatggtctccaaccgggacaccctcatcaggaattgcgatgctgagggctattttttagcccagtaccttatggatgacttcacaagagatccactgtatatcctggacaacaaccacacacatttgctgctcgtggacaatggctgtcatggacatcccactgtcgaagcaaagctccggaatcagctagagaagtatatctctgagcgcactattcaagattccaactatggtggcaagatccccattgtgtgttttgcccaaggaggtggaaaagagactttgaaagccatcaatacctccatcaaaaataaaattccttgtgtggtggtggaaggctcgggccagatcgctgatgtgatcgctagcctggtggaggtggaggatgccctgacatcttctgccgtcaaggagaagctggtgcgctttttaccccgcacggtgtcccggctgcctgaggaggagactgagagttggatcaaatggctcaaagaaattctcgaatgttctcacctattaacagttattaaaatggaagaagctggggatgaaattgtgagcaatgccatctcctacgctctatacaaagccttcagcaccagtgagcaagacaaggataactggaatgggcagctgaagcttctgctggagtggaaccagctggacttagccaatgatgagattttcaccaatgaccgccgatgggagtctgctgaccttcaagaagtcatgtttacggctctcataaaggacagacccaagtttgtccgcctctttctggagaatggcttgaacctacggaagtttctcacccatgatgtcctcactgaactcttctccaaccacttcagcacgcttgtgtaccggaatctgcagatcgccaagaattcctataatgatgccctcctcacgtttgtctggaaactggttgcgaacttccgaagaggcttccggaaggaagacagaaatggccgggacgagatggacatagaactccacgacgtgtctcctattactcggcaccccctgcaagctctcttcatctgggccattcttcagaataagaaggaactctccaaagtcatttgggagcagaccaggggctgcactctggcagccctgggagccagcaagcttctgaagactctggccaaagtgaagaacgacatcaatgctgctggggagtccgaggagctggctaatgagtacgagacccgggctgttgagctgttcactgagtgttacagcagcgatgaagacttggcagaacagctgctggtctattcctgtgaagcttggggtggaagcaactgtctggagctggcggtggaggccacagaccagcatttcatcgcccagcctggggtccagaattttctttctaagcaatggtatggagagatttcccgagacaccaagaactggaagattatcctgtgtctgtttattatacccttggtgggctgtggctttgtatcatttaggaagaaacctgtcgacaagcacaagaagctgctttggtactatgtggcgttcttcacctcccccttcgtggtcttctcctggaatgtggtcttctacatcgccttcctcctgctgtttgcctacgtgctgctcatggatttccattcggtgccacacccccccgagctggtcctgtactcgctggtctttgtcctcttctgtgatgaagtgagacagtggtacgtaaatggggtgaattattttactgacctgtggaatgtgatggacacgctggggcttttttacttcatagcaggaattgtatttcggctccactcttctaataaaagctctttgtattctggacgagtcattttctgtctggactacattattttcactctaagattgatccacatttttactgtaagcagaaacttaggacccaagattataatgctgcagaggatgctgatcgatgtgttcttcttcctgttcctctttgcggtgtggatggtggcctttggcgtggccaggcaagggatccttaggcagaatgagcagcgctggaggtggatattccgttcggtcatctacgagccctacctggccatgttcggccaggtgcccagtgacgtggatggtaccacgtatgactttgcccactgcaccttcactgggaatgagtccaagccactgtgtgtggagctggatgagcacaacctgccccggttccccgagtggatcaccatccccctggtgtgcatctacatgttatccaccaacatcctgctggtcaacctgctggtcgccatgtttggctacacggtgggcaccgtccaggagaacaatgaccaggtctggaagttccagaggtacttcctggtgcaggagtactgcagccgcctcaatatccccttccccttcatcgtcttcgcttacttctacatggtggtgaagaagtgcttcaagtgttgctgcaaggagaaaaacatggagtcttctgtctgctgtttcaaaaatgaagacaatgagactctggcatgggagggtgtcatgaaggaaaactaccttgtcaagatcaacacaaaagccaacgacacctcagaggaaatgaggcatcgatttagacaactggatacaaagcttaatgatctcaagggtcttctgaaagagattgctaataaaatcaaatga

SEQ ID NO: 38 - protein, 1104 aa, Homo sapiens
MSFRAARLSMRNRRNDTLDSTRTLYSSASRSTDLSYSESDLVNFIQANFKKRECVFFTKDSKATENVCKCGYAQSQHMEGTQINQSEKWNYKKHTKEFPTDAFGDIQFETLGKKGKYIRLSCDTDAEILYELLTQHWHLKTPNLVISVTGGAKNFALKPRMRKIFSRLIYIAQSKGAWILTGGTHYGLMKYIGEVVRDNTISRSSEENIVAIGIAAWGMVSNRDTLIRNCDAEGYFLAQYLMDDFTRDPLYILDNNHTHLLLVDNGCHGHPTVEAKLRNQLEKYISERTIQDSNYGGKIPIVCFAQGGGKETLKAINTSIKNKIPCVVVEGSGQIADVIASLVEVEDALTSSAVKEKLVRFLPRTVSRLPEEETESWIKWLKEILECSHLLTVIKMEEAGDEIVSNAISYALYKAFSTSEQDKDNWNGQLKLLLEWNQLDLANDEIFTNDRRWESADLQEVMFTALIKDRPKFVRLFLENGLNLRKFLTHDVLTELFSNHFSTLVYRNLQIAKNSYNDALLTFVWKLVANFRRGFRKEDRNGRDEMDIELHDVSPITRHPLQALFIWAILQNKKELSKVIWEQTRGCTLAALGASKLLKTLAKVKNDINAAGESEELANEYETRAVELFTECYSSDEDLAEQLLVYSCEAWGGSNCLELAVEATDQHFIAQPGVQNFLSKQWYGEISRDTKNWKIILCLFIIPLVGCGFVSFRKKPVDKHKKLLWYYVAFFTSPFVVFSWNVVFYIAFLLLFAYVLLMDFHSVPHPPELVLYSLVFVLFCDEVRQWYVNGVNYFTDLWNVMDTLGLFYFIAGIVFRLHSSNKSSLYSGRVIFCLDYIIFTLRLIHIFTVSRNLGPKIIMLQRMLIDVFFFLFLFAVWMVAFGVARQGILRQNEQRWRWIFRSVIYEPYLAMFGQVPSDVDGTTYDFAHCTFTGNESKPLCVELDEHNLPRFPEWITIPLVCIYMLSTNILLVNLLVAMFGYTVGTVQENNDQVWKFQRYFLVQEYCSRLNIPFPFIVFAYFYMVVKKCFKCCCKEKNMESSVCCFKNEDNETLAWEGVMKENYLVKINTKANDTSEEMRHRFRQLDTKLNDLKGLLKEIANKIK

SEQ ID NO: 39 - DNA, 558 bp, Homo sapiens
atgcctcgcctgttcttgttccacctgctagaattctgtttactactgaaccaattttccagagcagtcgcggccaaatggaaggacgatgttattaaattatgcggccgcgaattagttcgcgcgcagattgccatttgcggcatgagcacctggagcaaaaggtctctgagccaggaagatgctcctcagacacctagaccagtggcagaaattgtaccatccttcatcaacaaagatacagaaactataattatcatgttggaattcattgctaatttgccaccggagctgaaggcagccctatctgagaggcaaccatcattaccagagctacagcagtatgtacctgcattaaaggattccaatcttagctttgaagaatttaagaaacttattcgcaataggcaaagtgaagccgcagacagcaatccttcagaattaaaatacttaggcttggatactcattctcaaaaaaagagacgaccctacgtggcactgtttgagaaatgttgcctaattggttgtaccaaaaggtctcttgctaaatattgctga

SEQ ID NO: 40 - protein, 185 aa, Homo sapiens
MPRLFLFHLLEFCLLLNQFSRAVAAKWKDDVIKLCGRELVRAQIAICGMSTWSKRSLSQEDAPQTPRPVAEIVPSFINKDTETIIIMLEFIANLPPELKAALSERQPSLPELQQYVPALKDSNLSFEEFKKLIRNRQSEAADSNPSELKYLGLDTHSQKKRRPYVALFEKCCLIGCTKRSLAKYC

SEQ ID NO: 41 - DNA, 3978 bp, Homo sapiens
atgctgcccgtgtaccaggaggtgaagcccaacccgctgcaggacgcgaacctctgctcacgcgtgttcttctggtggctcaatcccttgtttaaaattggccataaacggagattagaggaagatgatatgtattcagtgctgccagaagaccgctcacagcaccttggagaggagttgcaagggttctgggataaagaagttttaagagctgagaatgacgcacagaagccttctttaacaagagcaatcataaagtgttactggaaatcttatttagttttgggaatttttacgttaattgaggaaagtgccaaagtaatccagcccatatttttgggaaaaattattaattattttgaaaattatgatcccatggattctgtggctttgaacacagcgtacgcctatgccacggtgctgactttttgcacgctcattttggctatactgcatcacttatatttttatcacgttcagtgtgctgggatgaggttacgagtagccatgtgccatatgatttatcggaaggcacttcgtcttagtaacatggccatggggaagacaaccacaggccagatagtcaatctgctgtccaatgatgtgaacaagtttgatcaggtgacagtgttcttacacttcctgtgggcaggaccactgcaggcgatcgcagtgactgccctactctggatggagataggaatatcgtgccttgctgggatggcagttctaatcattctcctgcccttgcaaagctgttttgggaagttgttctcatcactgaggagtaaaactgcaactttcacggatgccaggatcaggaccatgaatgaagttataactggtataaggataataaaaatgtacgcctgggaaaagtcattttcaaatcttattaccaatttgagaaagaaggagatttccaagattctgagaagttcctgcctcagggggatgaatttggcttcgtttttcagtgcaagcaaaatcatcgtgtttgtgaccttcaccacctacgtgctcctcggcagtgtgatcacagccagccgcgtgttcgtggcagtgacgctgtatggggctgtgcggctgacggttaccctcttcttcccctcagccattgagagggtgtcagaggcaatcgtcagcatccgaagaatccagacctttttgctacttgatgagatatcacagcgcaaccgtcagctgccgtcagatggtaaaaagatggtgcatgtgcaggattttactgctttttgggataaggcatcagagaccccaactctacaaggcctttcctttactgtcagacctggcgaattgttagctgtggtcggccccgtgggagcagggaagtcatcactgttaagtgccgtgctcggggaattggccccaagtcacgggctggtcagcgtgcatggaagaattgcctatgtgtctcagcagccctgggtgttctcgggaactctgaggagtaatattttatttgggaagaaatacgaaaaggaacgatatgaaaaagtcataaaggcttgtgctctgaaaaaggatttacagctgttggaggatggtgatctgactgtgataggagatcggggaaccacgctgagtggagggcagaaagcacgggtaaaccttgcaagagcagtgtatcaagatgctgacatctatctcctggacgatcctctcagtgcagtagatgcggaagttagcagacacttgttcgaactgtgtatttgtcaaattttgcatgagaagatcacaattttagtgactcatcagttgcagtacctcaaagctgcaagtcagattctgatattgaaagatggtaaaatggtgcagaaggggacttacactgagttcctaaaatctggtatagattttggctcccttttaaagaaggataatgaggaaagtgaacaacctccagttccaggaactcccacactaaggaatcgtaccttctcagagtcttcggtttggtctcaacaatcttctagaccctccttgaaagatggtgctctggagagccaagatacagagaatgtcccagttacactatcagaggagaaccgttctgaaggaaaagttggttttcaggcctataagaattacttcagagctggtgctcactggattgtcttcattttccttattctcctaaacactgcagctcaggttgcctatgtgcttcaagattggtggctttcatactgggcaaacaaacaaagtatgctaaatgtcactgtaaatggaggaggaaatgtaaccgagaagctagatcttaactggtacttaggaatttattcaggtttaactgtagctaccgttctttttggcatagcaagatctctattggtattctacgtccttgttaactcttcacaaactttgcacaacaaaatgtttgagtcaattctgaaagctccggtattattctttgatagaaatccaataggaagaattttaaatcgtttctccaaagacattggacacttggatgatttgctgccgctgacgtttttagatttcatccagacattgctacaagtggttggtgtggtctctgtggctgtggccgtgattccttggatcgcaatacccttggttccccttggaatcattttcatttttcttcggcgatattttttggaaacgtcaagagatgtgaagcgcctggaatctacaactcggagtccagtgttttcccacttgtcatcttctctccaggggctctggaccatccgggcatacaaagcagaagagaggtgtcaggaactgtttgatgcacaccaggatttacattcagaggcttggttcttgtttttgacaacgtcccgctggttcgccgtccgtctggatgccatctgtgccatgtttgtcatcatcgttgcctttgggtccctgattctggcaaaaactctggatgccgggcaggttggtttggcactgtcctatgccctcacgctcatggggatgtttcagtggtgtgttcgacaaagtgctgaagttgagaatatgatgatctcagtagaaagggtcattgaatacacagaccttgaaaaagaagcaccttgggaatatcagaaacgcccaccaccagcctggccccatgaaggagtgataatctttgacaatgtgaacttcatgtacagtccaggtgggcctctggtactgaagcatctgacagcactcattaaatcacaagaaaaggttggcattgtgggaagaaccggagctggaaaaagttccctcatctcagccctttttagattgtcagaacccgaaggtaaaatttggattgataagatcttgacaactgaaattggacttcacgatttaaggaagaaaatgtcaatcatacctcaggaacctgttttgttcactggaacaatgaggaaaaacctggatccctttaatgagcacacggatgaggaactgtggaatgccttacaagaggtacaacttaaagaaaccattgaagatcttcctggtaaaatggatactgaattagcagaatcaggatccaattttagtgttggacaaagacaactggtgtgccttgccagggcaattctcaggaaaaatcagatattgattattgatgaagcgacggcaaatgtggatccaagaactgatgagttaatacaaaaaaaaatccgggagaaatttgcccactgcaccgtgctaaccattgcacacagattgaacaccattattgacagcgacaagataatggttttagattcaggaagactgaaagaatatgatgagccgtatgttttgctgcaaaataaagagagcctattttacaagatggtgcaacaactgggcaaggcagaagccgctgccctcactgaaacagcaaaacaggtatacttcaaaagaaattatccacatattggtcacactgaccacatggttacaaacacttccaatggacagccctcgaccttaactattttcgagacagcactgtga

SEQ ID NO: 42 - protein, 1325 aa, Homo sapiens
MLPVYQEVKPNPLQDANLCSRVFFWWLNPLFKIGHKRRLEEDDMYSVLPEDRSQHLGEELQGFWDKEVLRAENDAQKPSLTRAIIKCYWKSYLVLGIFTLIEESAKVIQPIFLGKIINYFENYDPMDSVALNTAYAYATVLTFCTLILAILHHLYFYHVQCAGMRLRVAMCHMIYRKALRLSNMAMGKTTTGQIVNLLSNDVNKFDQVTVFLHFLWAGPLQAIAVTALLWMEIGISCLAGMAVLIILLPLQSCFGKLFSSLRSKTATFTDARIRTMNEVITGIRIIKMYAWEKSFSNLITNLRKKEISKILRSSCLRGMNLASFFSASKIIVFVTFTTYVLLGSVITASRVFVAVTLYGAVRLTVTLFFPSAIERVSEAIVSIRRIQTFLLLDEISQRNRQLPSDGKKMVHVQDFTAFWDKASETPTLQGLSFTVRPGELLAVVGPVGAGKSSLLSAVLGELAPSHGLVSVHGRIAYVSQQPWVFSGTLRSNILFGKKYEKERYEKVIKACALKKDLQLLEDGDLTVIGDRGTTLSGGQKARVNLARAVYQDADIYLLDDPLSAVDAEVSRHLFELCICQILHEKITILVTHQLQYLKAASQILILKDGKMVQKGTYTEFLKSGIDFGSLLKKDNEESEQPPVPGTPTLRNRTFSESSVWSQQSSRPSLKDGALESQDTENVPVTLSEENRSEGKVGFQAYKNYFRAGAHWIVFIFLILLNTAAQVAYVLQDWWLSYWANKQSMLNVTVNGGGNVTEKLDLNWYLGIYSGLTVATVLFGIARSLLVFYVLVNSSQTLHNKMFESILKAPVLFFDRNPIGRILNRFSKDIGHLDDLLPLTFLDFIQTLLQVVGVVSVAVAVIPWIAIPLVPLGIIFIFLRRYFLETSRDVKRLESTTRSPVFSHLSSSLQGLWTIRAYKAEERCQELFDAHQDLHSEAWFLFLTTSRWFAVRLDAICAMFVIIVAFGSLILAKTLDAGQVGLALSYALTLMGMFQWCVRQSAEVENMMISVERVIEYTDLEKEAPWEYQKRPPPAWPHEGVIIFDNVNFMYSPGGPLVLKHLTALIKSQEKVGIVGRTGAGKSSLISALFRLSEPEGKIWIDKILTTEIGLHDLRKKMSIIPQEPVLFTGTMRKNLDPFNEHTDEELWNALQEVQLKETIEDLPGKMDTELAESGSNFSVGQRQLVCLARAILRKNQILIIDEATANVDPRTDELIQKKIREKFAHCTVLTIAHRLNTIIDSDKIMVLDSGRLKEYDEPYVLLQNKESLFYKMVQQLGKAEAAALTETAKQVYFKRNYPHIGHTDHMVTNTSNGQPSTLTIFETAL

SEQ ID NO: 43 - DNA, 1140 bp, Homo sapiens
atggggaaagtgtcctgctgtggcatgaaataaatgaaacagaaaatgatggcaagactgctaagaacatcctttgctttgctcttccttggcctctttggggtgctgggggcagcaacaatttcatgcagaaatgaagaagggaaagctgtggactggtttactttttataagttacctaaaagacaaaacaaggaaagtggagagactgggttagagtacctgtacctagactctacaactagaagctggaggaagagtgagcaactaatgaatgacaccaagagtgttttgggaaggacattacaacagctatatgaagcatatgcctctaagagtaacaacacagcctatctaatatacaatgatggagtccctaaacctgtgaattacagtagaaagtatggacacaccaaaggtttactgctgtggaacagagttcaagggttctggctgattcattccatccctcagtttcctccaattccggaagaaggctatgattatccacccacagggagacgaaatggacaaagtggcatctgcataactttcaagtacaaccagtatgaggcaatagattctcagctcttggtctgcaaccccaacgtctatagctgctccatcccagccacctttcaccaggagctcattcacatgccccagctgtgcaccagggccagctcatcagagattcctggcaggctcctcaccacacttcagtcggcccagggacaaaaattcctccattttgcaaagtcggattcttttcttgacgacatctttgcagcctggatggctcaacggctgaagacacacttgttaacagaaacctggcagcgaaaaagacaagagcttccttcaaactgctcccttccttaccatgtctacaatataaaagcaattaaattatcacgacactcttatttcagttcttatcaagatcacgccaagtggtgtatttcccaaaagggcaccaaaaatcgctggacatgtattggagacctaaatcggagtccacaccaagccttcagaagtggaggattcatttgtacccagaattggcaaatttaccaagcatttcaaggattagtattatactatgaaagctgtaagtaaacttggtgaaaggacacaggt

SEQ ID NO: 44 - protein, 357 aa, Homo sapiens
MMARLLRTSFALLFLGLFGVLGAATISCRNEEGKAVDWFTFYKLPKRQNKESGETGLEYLYLDSTTRSWRKSEQLMNDTKSVLGRTLQQLYEAYASKSNNTAYLIYNDGVPKPVNYSRKYGHTKGLLLWNRVQGFWLIHSIPQFPPIPEEGYDYPPTGRRNGQSGICITFKYNQYEAIDSQLLVCNPNVYSCSIPATFHQELIHMPQLCTRASSSEIPGRLLTTLQSAQGQKFLHFAKSDSFLDDIFAAWMAQRLKTHLLTETWQRKRQELPSNCSLPYHVYNIKAIKLSRHSYFSSYQDHAKWCISQKGTKNRWTCIGDLNRSPHQAFRSGGFICTQNWQIYQAFQGLVLYYESCK

SEQ ID NO: 45 - DNA, 2243 bp, Homo sapiens
cggtgccctggggtggaatatcccctacgaatttaaccaagcggactttaatgccactgtgcagttcatccaaaaccacttggatgacatggatgtcaaaaagggtgtctcctggaccaccatccgctacatgataggagagattcaatatggaggcagagtcactgacgactatgataagagattgttgaacacatttgctaaggtttggttcagtgaaaatatgtttggaccagatttcagtttttaccaaggatacaatattccaaaatgcagcacagtggataactatcttcagtatatccagagtttgcctgcctatgacagccctgaggtgtttgggctgcaccccaatgctgacatcacctaccagagcaagctggccaaggacgtgctggacaccatcctaggcatccaacccaaggacacctctggtggaggggatgagacccgggaggcggtggtggcccggctggctgatgatatgctggagaagctgcccccagactatgtcccctttgaagtaaaagagaggctgcagaagatggggccattccagcctatgaacattttcctcaggcaggaaatagacagaatgcaaagggtactcagccttgtccgcagcaccctcactgagctgaaacttgctattgatggcaccatcatcatgagcgaaaatctgcaagatgcattggattgcatgtttgatgctagaatccctgcttggtggaaaaaagcttcttgggtttttagtacactgggtttctggtttactgaacttatagaaagaaacagccagtttacctcgtgggttttcaatggccgacctcactgcttttggatgacgggtttttttaacccccagggatttttaactgcaatgcgacaggaaataactcgggccaacaaaggctgggctctggacaatatggtgctttgcaatgaagtcaccaaatggatgaaggacgacatttctacccctcccacagagggtgtctatgtctatggcttatatcttgaaggtgctggctgggacaagaggaacatgaaactcattgaatcaaagccaaaagtgctctttgagttgatgcctgtcataaggatttatgcagaaaacaatactttacgagatcctcggttttactcctgtcccatctataagaagccagttcgaacggacttgaactacattgccgctgtggatctcaggacagcccagacccctgaacactgggtgctccgtggggttgcccttctgtgtgatgtcaagtaacatgtggggagtgtccccacccaatgctttggaaaatgcaagatctaaattattgtaacctttatttctgtatgactgctggacagtgtatgttaggtcgtttatgcaattaatgagctgcataggttttccccactccttaattggatgcttatattttacttgtttcatcattagtgaccaatgtctgagtttgttgaaaatgttatttagtgatataaaagtaaatttacagcatcctaatgaagtgtggccctcaaatccacagtagtatattttcttcttacttcgctccgaagactgactgtgattataacagcaaatatatttgcatgtggacaaagattagatggcaagatagaaaaataagaacagatgtgatagcaagaattatagttggcttgaaaaaatgtgatgatcaggagaaaaaataaaaaaagggtagaaatattagacggtgcgtagggactttctatggacttttattaattaggaaacattatcaaaggaacttttcacgtatttttctttaaattctggttagatgttattaataattcttcatctaacctactgactagaaaatatagtcagtactaaattagaattgtggtttataaacttttggttagctctggatctgtataactgcatttttttggataaacagtttttggtaggtggataccgggagacaagtgtgggtccctctcactgggcttcattctgtggaccaggatcattatttcatgctcatgatcatgagagttaggactgagtggctcctgtgactcccaccatcttagatgatactgttttcttgtgagttctttcttttggtgtggattagtatatcagttgatttgtgtgaattgtggtgaaacaatcatttcattttgaaaagcaagtaatgaaaatgtcagcatcataggaattaataaaatgtttttactaaaaaaaaaaaaaaaaa

SEQ ID NO: 46 - protein, 394 aa, Homo sapiens [sequence omitted]

SEQ ID NO: 47 - DNA, 6041 bp, Homo sapiens
ggagcagcctacaacttcacaaccagaaaccactacccctcaggggttgctttcagataaagatgacatgggaaggagaaatgctggcatagatttcggatccagaaaagcatcagcagcacagcccatacctgaaaacatggacaattccatggttagtgatccacaaccataccatgaagatgcagcttctggagctgagaagacagaagccagagcttctctctcactgatggtggaaagcctttctacaacccaagaggaggccattctctcagtagcagcagaggctcaggtgtttatgaatccttctcatatccagttagaagatcaagaagctttcagctttgatttacaaaaggcccaatccaaaatggagtcagcccaggatgttcaaactatctgcaaagaaaagccttctggaaatgttcaccagacctttacagcaagtgttttgggtatgacaagtactacagccaaaggagatgtttatgccaagactctgcctcccagaagcctttttcagtcctcaaggaagcctgatgctgaagaagtctcctcagattcagagaatattcctgaggagggggatggttctgaagaactggctcatggtcactcttcccagtccttggggaagtttgaagatgaacaagaagtcttctcagaatcaaaaagttttgttgaggacttgagcagctctgaggaggagctggacctcagatgcctctcccaggctttagaggagcctgaagatgcagaagtcttcacagaatcaagcagttatgttgaaaagtacaacacttctgatgattgcagcagctcagaggaagacctgcctctcagacaccctgctcaggccttgggaaagcccaaaaaccaacaagaagtctcctctgcttcaaataatactcctgaagagcagaatgattttatgcagcagctgccttccagatgcccttctcagcccattatgaatcctactgttcagcaacaagtccccaccagttcagtgggcacttctataaaacagagcgattccgtggagccaatccctccaagacaccctttccagccatgggtgaaccctaaagtggagcaagaagtttcctcatctccaaagagcatggctgttgaagagagcatttctatgaagcctctgcctcctaaacttctttgccagcccttgatgaatcctaaagttcaacaaaacatgttctcaggttcagaggacattgctgttgagagagtcatttctgtggagccactactccccagatattctcctcagtccttgacagatcctcaaatccggcaaatctcagaaagcacagctgttgaggaaggcacttatgtggaaccgctgcctcccagatgcctttcccagccctcggagaggcctaagttcctggactcaatgagtacttctgcagaatggagcagtcctgtggcaccaacaccttccaaatacacttccccgccatgggtgacccctaaatttgaggaactgtatcaactctctgcacatccagaaagcactactgttgaagaggacatttctaaggagcagctgcttcccagacatctttcccagttgactgtgggaaataaagtccagcaactgtcctcaaatttcgagcgggctgctattgaggcagacatttctgggagtccattgcctccccaatatgctacccagttcttaaagaggtctaaagttcaggaaatgacctcacgactagagaaaatggctgttgaaggcacttctaacaaatcaccgattcccaggcgtccgacccagtcattcgtgaaatttatggcacagcaaatcttttcagagagctctgctcttaagaggggcagtgatgtggcacctctgcctcccaatcttccttccaaatctttatcaaagcctgaagtcaagcaccaagttttctcagattcagggagtgctaatcctaagggaggcatttcttcaaagatgctacctatgaagcaccctttacagtccttggggaggcctgaagacccacagaaagttttctcttattcagagagagctcctgggaagtgcagcagttttaaagagcagctgtctcccaggcagctttcccaggccttgaggaaacctgagtatgagcaaaaagtctcccctgtttctgccagttctcctaaagagtggaggaattctaaaaagcagctgcctcccaaacattcttcccaagcctcagataggtctaaattccagccacagatgtcatcaaagggcccagtgaatgtacctgtaaagcagagcagcggtgagaagcacctgccttcaagtagtcctttccagcaacaggttcattcaagttctgtgaatgctgctgctaggcgatctgtttttgagagcaattctgacaattggttcctaggaagagatgaagcttttgcaatcaaaaccaagaaattcagccaaggttccaaaaaccccataaagagcattccagcccctgctaccaaacctgggaagttcaccattgctcctgtcaggcaaacatccacttctgggggcatttactctaagaaagaagatcttgagagtggtgatggtaataataaccagcatgcaaacctatccaatcaggatgatgttgaaaagctttttggagttcgactgaaaagagcccctccctcgcagaagtataagagtgagaaacaagataacttcacccagcttgcttcagtgccctcgggcccaatttcatcctctgtaggcaggggacataaaatcagaagcacttcccaggggctcctggatgctgcagggaacctcaccaaaatatcttacgttgcagataagcaacagagcaggcccaaatctgaaagcatggccaagaagcaacctgcttgcaagaccccaggaaagcctgctggtcaacagtcagattatgctgtctcagagccggtttggataactatggcaaagcagaagcagaagagtttcaaggcccacatttctgtgaaagagctgaaaactaagagcaatgctggagccgatgctgagactaaggagcctaaatatgagggagctggctctgcaaatgaaaaccaacctaaaaagatgttcacttccagtgtccataaacaggagaagacagcacagatgaagccacctaagcctacaaaatcagttggatttgaagctcagaagatactgcaagttcctgccatggaaaaagaaaccaaacgatcttcaactctcccagccaagttccagaacccagttgagccaattgagcctgtctggttctcactggccaggaagaaagccaaagcatggagccacatggcagaaatcacgcaataaagagctcttgtgtggagcatcagcatttattttatttagttttttttttttttttttttttgagacagagtctcgctctgttacccagattggagtgcagtggcgcgatctccgctcactgcaagctccgcctcccgggttcacgccactctcccgcctcagtctcccgactagctgggactacaggcgcccgccatcacgcccggctaattttgttttcgtatttttagtagagacggggtttcaccatgttggccaggatggtcttgatctcctgacctcgtgatccgcccgcctcagcctcccaaaagctgggattacaggcgtgagccaccgcgcccggccaagcatcagcgttttaaatgataattgctaatagctgtattaattctatgtagtgatctttttactgtgaccacttgtattaagcaaaataagtattaagcaaactaagaatttattaagcaaaataagaatttattaagcaaaatagccttagaaatgcaaattaaaacataattatttgaatgaaataaatgccatgaatgcttaaccttccacgtagtcactgccagcacccagaaacccagcatttcctctattaaaactatcgaaaacatttgcactgctgtaaaattgcaaaatctttaactttggacaatgtgctttagaagggagaaagcaaaaacattttgttggagcaactagaaaattgtcatttccctcaaccaaataaagtaattctaatggaaacattcagatgatttgacctaaagattggcctttaggttttatgagcctagatagatgccgcaattatttggttgttgctctaagctttgcaagggatcctaaaagaggcggtggaagtgaaaattctgggtctccaagaaaatttctgcacagccagttctccaatcagcctatcaccccttgaaacatcttccctgtgtccctgggggcccctgatgctttctccttgggtgatagtaacatgcagagcacttacacaaagctccctctttggacataccccacgtcgacctgtcacaggcctggctgtagcgagcacctccctatgacgcagaatgcttcttgggaattatcttactcctctggagggttagtccatcaatgttttgcttcttgtcccaatactactgtgaccctctctgatcgcacagaaatcactgcctatcacatatatcctgttaagcactgaagaccctattgaaattagagttctacagatgccaaaagctgtactttccatcaggcagatggcaagcttactgccttgatgcacatctggagccactggagctccttcctctctggttccagcattaaggtggagaactccatgtagcttcttgtcctttcccctcagctgtctttgcttcacaaggttttagcccaaagcaagagtgcaatcccaaagccacagagaaatgaactttccgctacctggaagctttaagtgagtaaatcagcttttcccctctcattcctagaggcacacacctcaaaagttactaggctggagagaccctaccttccagtgacccactcatcccccagccacggagaagagggaagaccaaaaagggagagtgagaaagaggatgagagggatggtcagctgtgaggggagggggcaagtggcccagcaaatgttgatgcctcccttcccatcttgccacacggtctttttcttttgtagcacagcctccattaataactcctcggctgaggatgaagatgtaggcacctttacccccagagccagttccttaattggctggctttctgagatgcagaccaccctagaatctcatctaggttcactagaagttagttaaatcttcctttctctgtctttctcttcattccatcccccaaacccaccaaacactaagggagagctccctttggatgtctgggcagtaaacctagctcatttttctaggagacccagaagtgacttctgagtagttatcactgtgtctgcctctgttacactgtgctgctttgcttaaacagaaatgcaggcctggacatctgactgtgcctttatattctgagtggggtgctgccccatgcaaaaaaatccagagaggtagtgaggtgtcagagctaaacacttggtgctgggttttgttgatgctggtataatgtgacacagtacaattacatgctaaattttgcattttctctatataacatctatttttcctgatactgtgcctttgccattttgataatgctattttgattgagtgaattttatttcctttgtattcccatagtgaacaatatattaaggtagatgccctttatctgggtactcctggtagattagctgttacacctcccttcccttttttacagtgaacctgtattcagttattgtcactctgagaactctccaataacaatttcttttccacagttaacaacacagctgttacacctcccttcctttttttcacagtgaacctgtattcagctattctcactctgagaactctccaataacaatttcttttccacagttaacaacaaagttctgtttttaaatgaagagattaagttctttttaaatgcctaaaggcatattctgacaacttttctacttctttaacttttttgatttaagatatatgcaaagcaaataaattcaataaagcct

SEQ ID NO: 48 - protein, 1115 aa, Homo sapiens
EQPTTSQPETTTPQGLLSDKDDMGRRNAGIDFGSRKASAAQPIPENMDNSMVSDPQPYHEDAASGAEKTEARASLSLMVESLSTTQEEAILSVAAEAQVFMNPSHIQLEDQEAFSFDLQKAQSKMESAQDVQTICKEKPSGNVHQTFTASVLGMTSTTAKGDVYAKTLPPRSLFQSSRKPDAEEVSSDSENIPEEGDGSEELAHGHSSQSLGKFEDEQEVFSESKSFVEDLSSSEEELDLRCLSQALEEPEDAEVFTESSSYVEKYNTSDDCSSSEEDLPLRHPAQALGKPKNQQEVSSASNNTPEEQNDFMQQLPSRCPSQPIMNPTVQQQVPTSSVGTSIKQSDSVEPIPPRHPFQPWVNPKVEQEVSSSPKSMAVEESISMKPLPPKLLCQPLMNPKVQQNMFSGSEDIAVERVISVEPLLPRYSPQSLTDPQIRQISESTAVEEGTYVEPLPPRCLSQPSERPKFLDSMSTSAEWSSPVAPTPSKYTSPPWVTPKFEELYQLSAHPESTTVEEDISKEQLLPRHLSQLTVGNKVQQLSSNFERAAIEADISGSPLPPQYATQFLKRSKVQEMTSRLEKMAVEGTSNKSPIPRRPTQSFVKFMAQQIFSESSALKRGSDVAPLPPNLPSKSLSKPEVKHQVFSDSGSANPKGGISSKMLPMKHPLQSLGRPEDPQKVFSYSERAPGKCSSFKEQLSPRQLSQALRKPEYEQKVSPVSASSPKEWRNSKKQLPPKHSSQASDRSKFQPQMSSKGPVNVPVKQSSGEKHLPSSSPFQQQVHSSSVNAAARRSVFESNSDNWFLGRDEAFAIKTKKFSQGSKNPIKSIPAPATKPGKFTIAPVRQTSTSGGIYSKKEDLESGDGNNNQHANLSNQDDVEKLFGVRLKRAPPSQKYKSEKQDNFTQLASVPSGPISSSVGRGHKIRSTSQGLLDAAGNLTKISYVADKQQSRPKSESMAKKQPACKTPGKPAGQQSDYAVSEPVWITMAKQKQKSFKAHISVKELKTKSNAGADAETKEPKYEGAGSANENQPKKMFTSSVHKQEKTAQMKPPKPTKSVGFEAQKILQVPAMEKETKRSSTLPAKFQNPVEPIEPVWFSLARKKAKAWSHMAEITQ

SEQ ID NO: 49 - DNA, 5976 bp, Homo sapiens
gctttcctttctaaagtagaagaggatgattatccctctgaagaactactagaggatgaaaacgctataaatgcaaaacggtctaaagaaaaaaaccctgggaatcagggcaggcagtttgatgttaatctgcaagtccctgacagagcagttttagggaccattcatccagatccagaaattgaagaaagcaagcaagaaactagtatgattttggatagtgaaaaaacaagtgagactgctgccaaaggggtcaacacaggaggcagggaaccaaatacaatggtggaaaaagaacgccctctggcagataagaaagcacagagaccatttgaacgaagtgacttttctgacagcataaaaattcagactccagaattaggtgaagtgtttcagaataaagattctgattatctgaagaacgacaaccctgaggaacatctgaagacctcagggcttgcaggggagcctgagggagaactctcaaaagaggaccatgggaacacagagaagtacatgggcacagaaagccaggggtctgctgctgcagaacctgaagatgactcgttccactggactccacatacaagtgtagagccagggcatagtgacaagagggaggacttacttatcataagcagcttctttaaagaacaacagtctttgcagcggttccagaagtactttaatgtccatgagctggaagccttgctacaagaaatgtcatcaaaactgaagtcagcgcagcaggagagcctgccctataatatggaaaaagtcctagataaggtcttccgtgcttctgagtcacaaattctgagcatagcagaaaaaatgcttgatactcgtgtggctgaaaatagagatctgggaatgaacgaaaataacatatttgaagaggctgcagtgcttgatgacattcaagacctcatctattttgtcaggtacaagcactccacagcagaggagacagccacactggtgatggcaccacctctagaggaaggcttgggtggagcaatggaagagatgcaaccactgcatgaagataatttctcacgagagaagacagcagaacttaatgtgcaggttcctgaagaacccacccacttggaccaacgtgtgattggggacactcatgcctcagaagtgtcacagaagccaaatactgagaaagacctggacccagggccagttacaacagaagacactcctatggatgctattgatgcaaacaagcaaccagagacagccgccgaagagccggcaagtgtcacacctttggaaaacgcaatccttctaatatattcattcatgttttatttaactaagtcgctagttgctacattgcctgatgatgttcagcctgggcctgatttttatggactgccatggaaacctgtatttatcactgccttcttgggaattgcttcgtttgccattttcttatggagaactgtccttgttgtgaaggatagagtatatcaagtcacggaacagcaaatttctgagaagttgaagactatcatgaaagaaaatacagaacttgtacaaaaattgtcaaattatgaacagaagatcaaggaatcaaagaaacatgttcaggaaaccaggaaacaaaatatgattctctctgatgaagcaattaaatataaggataaaatcaagacacttgaaaaaaatcaggaaattctggatgacacagctaaaaatcttcgtgttatgctagaatctgagagagaacagaatgtcaagaatcaggacttgatatcagaaaacaagaaatctatagagaagttaaaggatgttatttcaatgaatgcctcagaattttcagaggttcagattgcacttaatgaagctaagcttagtgaagagaaggtgaagtctgaatgccatcgggttcaagaagaaaatgctaggcttaagaagaaaaaagagcagttgcagcaggaaatcgaagactggagtaaattacatgctgagctcagtgagcaaatcaaatcatttgagaagtctcagaaagatttggaagtagctcttactcacaaggatgataatattaatgctttgactaactgcattacacagttgaatctgttagagtgtgaatctgaatctgagggtcaaaataaaggtggaaatgattcagatgaattagcaaatggagaagtgggaggtgaccggaatgagaagatgaaaaatcaaattaagcagatgatggatgtctctcggacacagactgcaatatcggtagttgaagaggatctaaagcttttacagcttaagctaagagcctccgtgtccactaaatgtaacctggaagaccaggtaaagaaattggaagatgaccgcaactcactacaagctgccaaagctggactggaagatgaatgcaaaaccttgaggcagaaagtggagattctgaatgagctctatcagcagaaggagatggctttgcaaaagaaactgagtcaagaagagtatgaacggcaagaaagagagcacaggctgtcagctgcagatgaaaaggcagtttcggctgcagaggaagtaaaaacttacaagcggagaattgaagaaatggaggatgaattacagaagacagagcggtcatttaaaaaccagatcgctacccatgagaagaaagctcatgaaaactggctcaaagctcgtgctgcagaaagagctatagctgaagagaaaagggaagctgccaatttgagacacaaattattagaattaacacaaaagatggcaatgctgcaagaagaacctgtgattgtaaaaccaatgccaggaaaaccaaatacacaaaaccctccacggagaggtcctctgagccagaatggctcttttggcccatcccctgtgagtggtggagaatgctcccctccattgacagtggagccacccgtgagacctctctctgctactctcaatcgaagagatatgcctagaagtgaatttggatcagtggacgggcctctacctcatcctcgatggtcagctgaggcatctgggaaaccctctccttctgatccaggatctggtacagctaccatgatgaacagcagctcaagaggctcttcccctaccagggtactcgatgaaggcaaggttaatatggctccaaaagggccccctcctttcccaggagtccctctcatgagcacccccatgggaggccctgtaccaccacccattcgatatggaccaccacctcagctctgcggaccttttgggcctcggccacttcctccaccctttggccctggtatgcgtccaccactaggcttaagagaatttgcaccaggcgttccaccaggaagacgggacctgcctctccaccctcggggatttttacctggacacgcaccatttagacctttaggttcacttggcccaagagagtactttattcctggtacccgattaccacccccaacccatggtccccaggaatacccaccaccacctgctgtaagagacttactgccgtcaggctctagagatgagcctccacctgcctctcagagcactagccaggactgttcacaggctttaaaacagagcccataaaactatgacctctgaggtttcattggaaagaaagtgtactgtgcattatccattacagtaaaggatttcattggcttcaaaatccaaaagtttattttaaaaggtttgttgttagaactaagctgccttggcagtgtgcatttttgagccaaacaattcaaaaatgtcatttcttccctaaataaaaatcaccttttaagctagagcgtccttacaactttgaaatgtgcaataaagaatacctgtgttttagctaatgtagcatatgtaattgcaaaatgatttagaatgtcatgaaaaatatgaacatttcctgtggaaatgctttaagaacatgtatttccattatcctatttttagtgtacaccagctgaatacggagcaatggtgtttataagcgtttttttaaactatctggtcacaaagactgttacgctaaaaatgtttactaaaagatcactaaactatctcccctcttgctgaagttctttgtagtaatagctcataaaaatttgtttattaatatttcccaagtgtctgttgactcattggactgttatgaggcttgtgccatttggggaacatgtaaactcaggctcccagaactgaagatggtggctggtggcacacttccggctgctcctccgtcacctgtgaactctacaagtgatgtctttttatttcaaagaagtttatttcccacttgtatagcattcacatgctttctttacgatcctcattgtctatttgagaatggttttctgagagtgagtttacattagtagcaagagttgtttgacctgatgttccattgtttttaccattcctgtagaaaaagggtgcacaacagaaaaatgaaaatgatgtgtcatggccataaaagtatagaaatctttaaaaattttaaaatgtacagtcccttatctatctttcccattccttgccactgatttttgaggaatataataaaaagattggaagagtataatgccatgagaaagaatgatttaggactgtgagggttataacatgccctaggtcagcaaccaagggttgaaatcagttctgttttagggggaaatggggggggcgacagatattattccaaaattaatattaattaatatttaaacgttggtgtttttatttaaaaatcagtaactaaccatctggaattgcaccatacttaaagtcttatccattactacactgtctttaaaacaatgtttctttaaatactctacaacgtttctaagaacgaacttcagacattttaattacagtaataatagcactccttttaaggagtttcagatccacactaaaactaaaatcataaaaggctgatacttttgtttgctgctaggctatattcttccattctttgaagtcctatgatgtaatatttttgaaacctagtgtatgtcttgtcactgttgtgatatttaatcgattaagaataccttgtaaaaaggagcaaaagcttcaatgtgaaacaattttctctctttatactaaacaactgaagatagatagtttagaaagataaggacctttgaaagaagacaactctgtcaaagttcataaggaatataaaaattcttcaggaaaagagaattcaatctatatgtcctcccgtttaatatcaagaatagaagaaattaagaggaaaactccacagaagagcataggccacttttagccatgtaaaaataagattaagtcacaaatacaacttttgaatttacctgtcaatatctctttaggacacaaaacaatgctgaagttaatataatttctaattttaaatgtcatttaagtgtagattatgccatctaggaaggtaagtaggaaaggtaaattaaatctatttttaaaattcaaaatattagagtatttttcccctctaaagccttttttggtgattattctgtatctgacataattgagaaactggtaagctgtaaagattccagtgtagcttctctgagaagttgtgagccagtccataactgcttcctcacatccatctgattgcaccatttctgcagcaaaccccaaagcagggtgccaatatgcagatggcatagggagtatcatccctcagccaaatcacttttccatctctaaagtttcatctattttggaagtcatctccaactaattgtgtctggatttagttgctaaaattgtcttatttatttatgaagcagcaatattcagcctgaaagcatttctgccatagttgttgtagttatatcgccaatggctgatttttttcattggaaagtaaatttaagtaattcgtgggatgtggtatattctgtgtcaacttcaagataatcactcattttctcgttatattcaggtctgaattaaagttaagttaatcac

SEQ ID NO: 50 - protein, 1193 aa, Homo sapiens
AFLSKVEEDDYPSEELLEDENAINAKRSKEKNPGNQGRQFDVNLQVPDRAVLGTIHPDPEIEESKQETSMILDSEKTSETAAKGVNTGGREPNTMVEKERPLADKKAQRPFERSDFSDSIKIQTPELGEVFQNKDSDYLKNDNPEEHLKTSGLAGEPEGELSKEDHGNTEKYMGTESQGSAAAEPEDDSFHWTPHTSVEPGHSDKREDLLIISSFFKEQQSLQRFQKYFNVHELEALLQEMSSKLKSAQQESLPYNMEKVLDKVFRASESQILSIAEKMLDTRVAENRDLGMNENNIFEEAAVLDDIQDLIYFVRYKHSTAEETATLVMAPPLEEGLGGAMEEMQPLHEDNFSREKTAELNVQVPEEPTHLDQRVIGDTHASEVSQKPNTEKDLDPGPVTTEDTPMDAIDANKQPETAAEEPASVTPLENAILLIYSFMFYLTKSLVATLPDDVQPGPDFYGLPWKPVFITAFLGIASFAIFLWRTVLVVKDRVYQVTEQQISEKLKTIMKENTELVQKLSNYEQKIKESKKHVQETRKQNMILSDEAIKYKDKIKTLEKNQEILDDTAKNLRVMLESEREQNVKNQDLISENKKSIEKLKDVISMNASEFSEVQIALNEAKLSEEKVKSECHRVQEENARLKKKKEQLQQEIEDWSKLHAELSEQIKSFEKSQKDLEVALTHKDDNINALTNCITQLNLLECESESEGQNKGGNDSDELANGEVGGDRNEKMKNQIKQMMDVSRTQTAISVVEEDLKLLQLKLRASVSTKCNLEDQVKKLEDDRNSLQAAKAGLEDECKTLRQKVEILNELYQQKEMALQKKLSQEEYERQEREHRLSAADEKAVSAAEEVKTYKRRIEEMEDELQKTERSFKNQIATHEKKAHENWLKARAAERAIAEEKREAANLRHKLLELTQKMAMLQEEPVIVKPMPGKPNTQNPPRRGPLSQNGSFGPSPVSGGECSPPLTVEPPVRPLSATLNRRDMPRSEFGSVDGPLPHPRWSAEASGKPSPSDPGSGTATMMNSSSRGSSPTRVLDEGKVNMAPKGPPPFPGVPLMSTPMGGPVPPPIRYGPPPQLCGPFGPRPLPPPFGPGMRPPLGLREFAPGVPPGRRDLPLHPRGFLPGHAPFRPLGSLGPREYFIPGTRLPPPTHGPQEYPPPPAVRDLLPSGSRDEPPPASQSTSQDCSQALKQSP

SEQ ID NO: 51 - DNA, 3287 bp, Homo sapiens
agactgaggcggaggcagccccgcgccgcgccggacccgagcatatttcattttctgtcattggactttgagccattagaaccatgagcaactacagtgtgtcactggttggcccagctccttggggtttccggctgcagggcggtaaggatttcaacatgcctctgacaatctctagtctaaaagatggcggcaaggcagcccaggcaaatgtaagaataggcgatgtggttctcagcattgatggaataaatgcacaaggaatgactcatcttgaagcccagaataagattaagggttgtacaggctctttgaatatgactctgcaaagagcatctgctgcacccaagcctgagccggttcctgttcaaaagggagaacctaaagaagtagttaaacctgtgcccattacatctcctgctgtgtccaaagtcacttccacaaacaacatggcctacaataaggcaccacggccttttggttctgtgtcttcaccaaaagtcacatccatcccatcaccatcgtctgccttcaccccagcccatgcgaccacctcatcacatgcttccccttcacccgtggctgccgtcactcctcccctgttcgctgcatctggactgcatgctaatgccaatcttagtgctgaccagtctccatctgcactgagcgctggtaaaactgcagttaatgtcccacggcagcccacagtcaccagcgtgtgttccgagacttctcaggagctagcagagggacagagaagaggatcccagggtgacagtaaacagcaaaatggcccaccaagaaaacacattgtggagcgctatacagagttttatcatgtacccactcacagtgatgccagcaagaagagactgattgaggatactgaagactggcgtccaagaactggaacaactcagtctcgctctttccgaatccttgcccagatcactgggactgaacatttgaaagaatctgaagccgataatacaaagaaggcaaataactctcaggagccttctccgcagttggcttccttggtagcttccacacggagcatgcccgagagcctggacagcccaacctctggcagaccaggggttaccagcctcacaactgcagctgccttcaagcctgtaggatccactggcgtcatcaagtcaccaagctggcaacggccaaaccaaggagtaccttccactggaagaatctcaaacagcgctacttactcaggatcagtggcaccagccaactcagctttgggacaaacccagccaagtgaccaggacactttagtgcaaagagctgagcacattccagcagggaaacgaactccgatgtgcgcccattgtaaccaggtcatcagaggaccattcttagtggcactggggaaatcttggcacccagaagaattcaactgcgctcactgcaaaaatacaatggcctacattggatttgtagaggagaaaggagccctgtattgtgagctgtgctatgagaaattctttgcccctgaatgtggtcgatgccaaaggaagatccttggagaagtcatcaatgcgttgaaacaaacttggcatgtttcctgttttgtgtgtgtagcctgtggaaagcccattcggaacaatgtttttcacttggaggatggtgaaccctactgtgagactgattattatgccctctttggtactatatgccatggatgtgaatttcccatagaagctggtgacatgttcctggaagctctgggctacacctggcatgacacttgctttgtatgctcagtgtgttgtgaaagtttggaaggtcagacctttttctccaagaaggacaagcccctgtgtaagaaacatgctcattctgtgaatttttgaaagtcaacagttcaggagaagagaaggaatttgaagagaaaaaggaaaattaaaattactaattaatttttagattcaatatttatatggagttttgaaaaataatagtggccctgaaggaataaattccagctttaaaaaccaagtctgaggaaatatttggcttcataaagtaaagagacggtttggcatttattattactttttcctgtattttatgcccataaaataagctttataaaaaccaatttcctgatggactattaaattcatcttagaataaattagtgaagaatttaattttagaataaataatccaatctgaaataattataccttctttccttgttaggtagttatgagtaaatctgcaaaaggcaatgaaaatgccttaaattttatcaataacagaattattgtatttaaaaaaaaactaatacttatctttaaaatagtaaataggattttaaacagagaattttatcagtaataggtgtcagtttttaaaaaattgcttgtaggctgagcgcggtggctcacgcctgtaatcccagcactttgggaggccaaggtgggtggaccacatgaggtcaggagtttgagatcagcctggccaacatggtgaaaccccatctctactaaaaatacaaaaattagccggacgcagtggcacgcgcctgtaatcccagctactcaagaggctgaggcacgagaatcacttgaacccgggagggagaggttgcagtgagccaagatcgtaccactgcactccagcctgggtgacagagtgagactccgtctccaaaaaaaaactttgcttgtatattatttttgccttacagtggatcattctagtaggaaaggacaataagattttttatcaaaatgtgtcatgccagtaagagatgttatattcttttcttatttcttccccacccaaaaataagctaccatatagcttataagtctcaaatttttgccttttactaaaatgtgattgtttctgttcattgtgtatgcttcatcacctatattaggcaaattccattttttcccttgcgctaaggtaaagatttaattaaataattttggcctctcatagttttctctctctttaaagagaataaatagagggccaggtgtggtggctcacgcctgtgatcccagcactttgggaggccaagacgggcggatcatgaggtcaagagatcaagatcatcctggccaacatggtgaaaccctgtctctactaaaaatacaaaaatgagctgggcatggtggggcgtgcctgtagtcccatgtacttgggaggctgaggcaggaaaattcttgaacccaggagacggaagttgcagtgagctgagatcacaccactgcactccagcctggtgacagagcaagactccggctctt

SEQ ID NO: 52 - protein, 596 aa, Homo sapiens
MSNYSVSLVGPAPWGFRLQGGKDFNMPLTISSLKDGGKAAQANVRIGDVVLSIDGINAQGMTHLEAQNKIKGCTGSLNMTLQRASAAPKPEPVPVQKGEPKEVVKPVPITSPAVSKVTSTNNMAYNKAPRPFGSVSSPKVTSIPSPSSAFTPAHATTSSHASPSPVAAVTPPLFAASGLHANANLSADQSPSALSAGKTAVNVPRQPTVTSVCSETSQELAEGQRRGSQGDSKQQNGPPRKHIVERYTEFYHVPTHSDASKKRLIEDTEDWRPRTGTTQSRSFRILAQITGTEHLKESEADNTKKANNSQEPSPQLASLVASTRSMPESLDSPTSGRPGVTSLTTAAAFKPVGSTGVIKSPSWQRPNQGVPSTGRISNSATYSGSVAPANSALGQTQPSDQDTLVQRAEHIPAGKRTPMCAHCNQVIRGPFLVALGKSWHPEEFNCAHCKNTMAYIGFVEEKGALYCELCYEKFFAPECGRCQRKILGEVINALKQTWHVSCFVCVACGKPIRNNVFHLEDGEPYCETDYYALFGTICHGCEFPIEAGDMFLEALGYTWHDTCFVCSVCCESLEGQTFFSKKDKPLCKKHAHSVNF

SEQ ID NO: 53 - DNA, 1115 bp, Homo sapiens
atggccaactgtaaaatgaccaaaagcatcaggttccctgccctggagcactgctatactggcggggaggtcgtgttgcccaaggatcaggaggagtggaaaagacggacgggccttctgctctacgagaactatgggcagtcggaaacgggactaatttgtgccacctactggggaatgaagatcaagccgggtttcatggggaaggccactccaccctatgacgtccagtttcatatggaggcctcagttgaaaactgcattattgtgagcatgaacaccgctgaccctggcagccagggcatcacacacagcctcttgctacaggtcattgatgacaagggcagcatcctgccacctaacacagaaggaaacattggcatcagaatcaaacctgtcaggcctgtgagcctcttcatgtgctatgagggtgacccagagaagacagctaaagtggaatgtggggacttctacaacactggggacagaggaaagatggatgaagagggctacatttgtttcctggggaggagtgatgacatcattaatgcctctgggtatcgcatcgggcctgcagaggttgaaagcgctttggtggagcacccagcggtggcggagtcagccgtggtgggcagcccagacccgattcgaggggaggtggtgaaggcctttattgtcctgaccccacagttcctgtcccatgacaaggatcagctgaccaaggaactgcagcagcatgtcaagtcagtgacagccccatacaagtacccaaggaaggtggagtttgtctcagagctgccaaaaaccatcactggcaagattgaacggaaggaacttcggaaaaaggagactggtcagatgtaatcggcagtgaactcagaacgcactgcacacctgaggcaaatccctggccactttagtctccccactatggtgaggacgagggtggggcattgagagtgttgatttgggaaagtatcaggagtgccatgattccaatgttttccttcttttaaattaaattcagttgctctgcttcctccaagtcctctgtatctttagaatttcccaggtgagcactcataacgcaagtaataaaatactgatatcaacaa

SEQ ID NO: 54 - protein, 287 aa, Homo sapiens
MANCKMTKSIRFPALEHCYTGGEVVLPKDQEEWKRRTGLLLYENYGQSETGLICATYWGMKIKPGFMGKATPPYDVQFHMEASVENCIIVSMNTADPGSQGITHSLLLQVIDDKGSILPPNTEGNIGIRIKPVRPVSLFMCYEGDPEKTAKVECGDFYNTGDRGKMDEEGYICFLGRSDDIINASGYRIGPAEVESALVEHPAVAESAVVGSPDPIRGEVVKAFIVLTPQFLSHDKDQLTKELQQHVKSVTAPYKYPRKVEFVSELPKTITGKIERKELRKKETGQM

SEQ ID NO: 55 - DNA, 521 bp, Homo sapiens
gagagagggaggcagaagaggaagtcagagcgatgtgctgtgaaatctactaccgtttgctggttttgaaaatggagaaaaagagtgaggaactgagaaacatggatggccttgggaacgtggaaaagggtcactgaaatgggacgacatgaactcaaggaggctatttatgaccatgtcatttgcaacatgaagaaagcttatctggagtgaaagtaaatgagaccaacagagataagagacccggagaaatcctggttacactgcttgaatcctgtcagtcctatactggagtcctgttaatacaaaataatagtaataatccctctgtttcttatgtttatgccaacttcaacaaaaagaaacttgactaagagacaatataagaacttaatgtgtaattaagaaagaactctccaccacggggaatgtgaaaggtatatgagtcccttttcacgatgcgatgtcatgtcttttaaataagccatactttatgttcaataaaaagagaataagcagga

SEQ ID NO: 56 - protein, 34 aa, Homo sapiens
MCCEIYYRLLVLKMEKKSEELRNMDGLGNVEKGH

SEQ ID NO: 57 - DNA, 2064 bp, Homo sapiens
atggacagttgcctgcaacatatgagagacctactttacctccttcaggagctcaggtgtttaaatccagctacactactccctgatccagactccactactcctgttcatgactgtcaggatctgttggaaactaccaaaactggccaacctgatcttcaagatgtgcccctagaaaaggcagatgccactgtgttcacagatggtagcagcttcctcgagcagggagaacgaaaagctgtttcttttccacagccagatctgcctgacaatcccacatactcaacagaagaagaaaaactggcttcagatgttggagcaaataaaaatcaggaaggacgtgtattcgcaaacactacttggagggccggtacctccaaggaagtctcctttgcagttgatttatgtgtactgttcccagagccagctcgtacccatgaagagcaacataatttgccggtcataggagcaggaagtgtcgaccttgcagcaggatttggacactctgggagccaaactggatgtggaagctccaaaggtgcagaaaaagggctccaaaatgttgacttttacctctgtcctggaaatcaccctgacgctagctgtagagatacttaccagtttttctgccctgattggacatgtgtaactttagccacctactctgggggatcaactagatcttcaactctttccataagtcgtgttcctcatcctaaattatgtactagaaaaaattgtaatcctcttactataactgtccatgaccctaatgcagctcaatggtattatggcatgtcatggggattaagactttatatcccaggatttgatgttgggactatgttcaccatccaaaagaaaatcttggtctcatggagctcccccaagccaatcgggcctttaactgatctaggtgaccctatattccagaaacaccctgacaaagttgatttaactgttcctctgccattcttagttcctagaccccagctacaacaacaacatcttcaacccagcctaatgtctatactaggtggagtacaccatctccttaacctcacccagcctaaactagcccaagattgttggctatgtttaaaagcaaaacccccttattatgtaggattaggagtagaagccacacttaaacgtggccctctatcttgtcatacacgaccccgtgctctcacaataggagatgtgtctggaaatgcttcctgtctgattagtaccgggtataacttatctgcttctccttttcaggctacttgtaatcagtccctgcttacttccataagcacctcagtctcttaccaagcacccaacaatacctggttggcctgcacctcaggtctcactcgctgcattaatggaactgaaccaggacctctcctgtgcgtgttagttcatgtacttccccaggtatatgtgtacagtggaccagaaggacgacaactcatcgctccccctgagttacatcccaggttgcaccaagctgtcccacttctggttcccctattggctggtcttagcatagctggatcagcagccattggtacggctgccctggttcaaggagaaactggactaatatccctgtctcaacaggtggatgctgattttagtaacctccagtctgccatagatatactacattcccaggtagagtctctggctgaagtagttcttcaaaactgccgatgcttagatctgctattcctctctcaaggaggtttatgtgcagctctaggagaaagttgttgcttctatgccaatcaatctggagtcataaaaggtacagtaaaaaaagttcgagaaaatctagataggcaccaacaagaacgagaaaataacatcccctggtatcaaagcatgtttaactggaacccatggctaactactttaatcactgggttagctggacctctcctcatcctactattaagtttaatttttgggccttgtatattaaattcgtttcttaattttataaaacaacgcatagcttctgtcaaacttacgtatcttaagactcaatatgacacccttgttaataactga

SEQ ID NO: 58 - protein, 687 aa, Homo sapiens
MDSCLQHMRDLLYLLQELRCLNPATLLPDPDSTTPVHDCQDLLETTKTGQPDLQDVPLEKADATVFTDGSSFLEQGERKAVSFPQPDLPDNPTYSTEEEKLASDVGANKNQEGRVFANTTWRAGTSKEVSFAVDLCVLFPEPARTHEEQHNLPVIGAGSVDLAAGFGHSGSQTGCGSSKGAEKGLQNVDFYLCPGNHPDASCRDTYQFFCPDWTCVTLATYSGGSTRSSTLSISRVPHPKLCTRKNCNPLTITVHDPNAAQWYYGMSWGLRLYIPGFDVGTMFTIQKKILVSWSSPKPIGPLTDLGDPIFQKHPDKVDLTVPLPFLVPRPQLQQQHLQPSLMSILGGVHHLLNLTQPKLAQDCWLCLKAKPPYYVGLGVEATLKRGPLSCHTRPRALTIGDVSGNASCLISTGYNLSASPFQATCNQSLLTSISTSVSYQAPNNTWLACTSGLTRCINGTEPGPLLCVLVHVLPQVYVYSGPEGRQLIAPPELHPRLHQAVPLLVPLLAGLSIAGSAAIGTAALVQGETGLISLSQQVDADFSNLQSAIDILHSQVESLAEVVLQNCRCLDLLFLSQGGLCAALGESCCFYANQSGVIKGTVKKVRENLDRHQQERENNIPWYQSMFNWNPWLTTLITGLAGPLLILLLSLIFGPCILNSFLNFIKQRIASVKLTYLKTQYDTLVNN

SEQ ID NO: 59 - DNA, 2960 bp, Homo sapiens
tgatggtggaaatttcttgaaaccgctctcgtaatttgccacgtgctgttgcaaatattctggtgaatgaacacagaatcagcatggctttcctttgctgagaaatcactgatgggaagtgagacttgttaaacttgaaagtgaatggacctgagtggaccctttgatcacatcagtaaacatgagcggtaccaaacctgatattttatgggcaccacaccatgttgatagatttgttgtgtgtgactcagaactaagtctttatcatgtggaatctactgtgaattcagaactcaaagctggatctttacgtttatctgaagactctgcagctacattactgtcaataaattcagatacaccctatatgaaatgtgttgcctggtatcttaattatgatcctgaatgtctgctggcagttggacaagcaaatggtcgagttgtacttacaagccttggtcaagatcataactcaaagttcaaagatttgataggaaaagagtttgttccaaaacatgcacgacaatgtaatacccttgcctggaatccactggatagtaactggctagctgctggtttagataagcacagagctgacttttcagtgctaatatgggatatctgcagcaaatatactcctgatatagttcccatggaaaaagtgaaactttcagcaggtgaaactgaaacaacattattagtaacaaaaccactttatgagttaggacagaatgatgcttgtctgtctctttgttggcttccacgagaccagaaacttctccttgctggtatgcatcgtaacctagctatatttgatcttcggaatacaagccaaaagatgttcgtaaatacaaaagctgttcagggtgtgacggtagacccatatttccacgatcgtgttgcttccttctatgaaggtcaggttgcaatatgggatcttagaaaatttgagaagccagttttgacattgactgagcaaccaaaacccttaacaaaagtagcatggtgtcccactaggactggtctacttgccactttaacaagggatagtaatattattagattgtatgatatgcagcatacacccactcccattggggatgaaactgaacccacaataattgaaagaagtgtgcaaccttgtgacaattacattgcttcctttgcgtggcatccaacaagtcaaaatcgaatgatagttgtaactcccaaccgaacaatgtcagacttcactgtttttgaaaggatatctcttgcctggagcccaattacatctttaatgtgggcttgtggtcgtcatttatatgaatgtacggaagaagaaaatgataattctttagaaaaagatatagcaacgaagatgcgtcttcgggctttatcaaggtatggacttgatacagagcaggtgtggaggaaccacattttagctggaaatgaagatccacagctcaagtcactctggtatactctgcactttatgaagcaatacacagaagatatggatcagaaatctccaggcaacaaaggatcattggtttatgcaggaattaaatcaattgtaaagtcatcgttgggaatggtggaaagcagcagacataattggagtgggttggataagcaaagtgatattcaaaacttaaatgaagagagaatcttagctttacagctttgtgggtggataaagaaaggaacggatgtagacgtggggccatttttgaactcccttgtacaagaaggggaatgggaaagagctgctgctgtggcattgttcaacttggatattcgccgagcaatccaaatcctgaatgaaggggcatcttctgaaaaaggcaggagatctgaatctcaatgtggtagcaatggctttatcgggttatacggatgagaagaactccctttggagagaaatgtgtagcacactgcgattacagctaaataacccgtatttgtgtgtcatgtttgcatttctgacaagtgaaacaggatcttacgatggagttttgtatgaaaacaaagttgcagtacgtgacagagtggcatttgcttgtaaattccttagtgatactcagatacatcgaaaagttgaccaatgaaatgaaagaggctggaaatttggaaggaattttgcttacaggccttactaaagatggagtggacttaatggagagttatgttgatagaactggagatgttcaaacagcaagttactgtatgttacagggttcacctttagatgttcttaaagatgaaagggttcagtactggattgagaattatagaaatttattagatgcctggaggttttggcataaacgagctgaatttgatattcacaggagtaagttggatcccagttccaagcctttagcacaagtttttgtgagttgcaatttctgtggcaagtcaatctcctacagctgttcagctgtgcctcatcagggcagaggttttagtcagtatggtgtgagtggctcaccaacgaaatctaaagtcacaagttgtcctggctgtcgaaaaccacttcctcgatgtgcgctttgtctcattaatatgggaacaccagtttctagctgtcctggaggaaccaaatcagatgaaaaagtggacttgagcaaggacaaaaaattagcccaatttaacaactggtttacatggtgtcataattgcaggcacggtggacatgctggacatatgcttagttggttcagggaccatgcagagtgccctgtgtctgcatgcacgtgtaaatgtatgcagttggatacaacggggaatctggtacctgcagagactgtccagccataaaatgttaccaccttaagagaacccttcaagtgtggagctttctagtaggtgtccttcatagctcagaaacatacctcagaacaagccattcatgacttacctgtaatgggaaaataaatcattctatcagaaaaaaaaaaaaaaaaaaaaaaaaa

SEQ ID NO: 60 - protein, 567 aa, Homo sapiens
MSGTKPDILWAPHHVDRFVVCDSELSLYHVESTVNSELKAGSLRLSEDSAATLLSINSDTPYMKCVAWYLNYDPECLLAVGQANGRVVLTSLGQDHNSKFKDLIGKEFVPKHARQCNTLAWNPLDSNWLAAGLDKHRADFSVLIWDICSKYTPDIVPMEKVKLSAGETETTLLVTKPLYELGQNDACLSLCWLPRDQKLLLAGMHRNLAIFDLRNTSQKMFVNTKAVQGVTVDPYFHDRVASFYEGQVAIWDLRKFEKPVLTLTEQPKPLTKVAWCPTRTGLLATLTRDSNIIRLYDMQHTPTPIGDETEPTIIERSVQPCDNYIASFAWHPTSQNRMIVVTPNRTMSDFTVFERISLAWSPITSLMWACGRHLYECTEEENDNSLEKDIATKMRLRALSRYGLDTEQVWRNHILAGNEDPQLKSLWYTLHFMKQYTEDMDQKSPGNKGSLVYAGIKSIVKSSLGMVESSRHNWSGLDKQSDIQNLNEERILALQLCGWIKKGTDVDVGPFLNSLVQEGEWERAAAVALFNLDIRRAIQILNEGASSEKGRRSESQCGSNGFIGLYG

SEQ ID NO: 61 - DNA, 856 bp, Homo sapiens
  modified_base (37)..(37): a, c, g, t, unknown or other
  modified_base (757)..(757): a, c, g, t, unknown or other
  modified_base (769)..(769): a, c, g, t, unknown or other
ttgtacatcttaacaaccttaagctgtacaaatagancaataatatctaaatggtgtgatgatcagcccacagtacacatcattgatgagaatttcactggtctcaacctttctcatgctgagtcctggctttgtaaaatgacttataaaggtccaaggatttagagatgattaagagataagctggcattctgtaaaggcaccatcgtctatcccctgtcttatctagataaagaatgtagtgctaaatcttgtaataatattgtacaaatggaaattcaatcttaaggattattttttccatattgttgtatttcattgtggtgtattggaaagtgatctggactttgagtgagaagatgtgatttggaccatggcacttaaaaactctataacctcaggcaagtcttttaatcttctctgagcctcagttttcctcatttttcaaatatagagagtataacatttatctcataagacaagttgtagtaaattactgttttacaaatgtaagataacttttaactgtgagattccatattccagtcttacattattatgtttatctgccacagggagaagtcctcagataaaaatgtctaccaaaagactgacacgtggagttaatcatttgacagatgcaaatgcttccacccccaacaaatatactttctttaacttctgtgtgggtatcacttagggaaaaaaaggcaggcaacaaaatattttttaattctatcttaggaaaaattgtagncaaatctttttntcccattaacaaataatgtaagccttaatattcaaggggtaataaaaatacaaagtcttccaaacaggtaacttacttgaaaacttt

SEQ ID NO: 62 - protein, 348 aa, Homo sapiens
  MOD_RES (152)..(152): Variable amino acid
  MOD_RES (154)..(154): Variable amino acid
  MOD_RES (217)..(217): Variable amino acid
MGARGAPSRRRQAGRRLRYLPTGSFPFLLLLLLLCIQLGGGQKKKENLLAEKVEQLMEWSSRRSIFRMNGDKFRKFIKAPPRNYSMIVMFTALQPQRQCSVCRQANEEYQILANSWRYSSAFCNKLFFSMVDYDEGTDVFQQLNMNSAPTFXHXPPKGRPKRADTFDLQRIGFAAEQLAKWIADRTDVHIRVFRPPNYSGTIALALLVSLVGGLLYXRRNNLEFIYNKTGWAMVSLCIVFAMTSGQMWNHIRGPPYAHKNPHNGQVSYIHGSSQAQFVAESHIILVLNAAITMGMVLLNEAATSKGDVGKRRIICLVGLGLVVFFFSFLLSIFRSKYHGYPYSDLDFE

SEQ ID NO: 63 - DNA, 1130 bp, Homo sapiens
ggtcgccgcaccggccgcctccggcccgccgccgcccccagcgccgccgccgccaccgccggggcgcccaccgcgctgccagcctaccccgcggccgagccgcccgggccgctgtggctgcagggcgagccgctgcatttctgctgcctagacttcagcctggaggagctgcagggcgagccgggctggcggctgaaccgtaagcccattgagtccacgctggtggcctgcttcatgaccctggtcatcgtggtgtggagcgtggccgccctcatctggccggtgcccatcatcgccggcttcctgcccaacggcatggaacagcgccggaccaccgccagcaccaccgcagccacccccgccgcagtgcccgcagggaccaccgcagccgccgccgccgccgccgctgccgccgccgccgcggccgtcacttcgggggtggcgaccaagtgacccgctccgctcctccctgtgtccgtcctgtgtccgcgcgcgcgggtgcctttcccgccggggactcggccggtgtgcttcgtgctgtagttatcgttagttcctcttcccgagatggggccgccgagagaccccagcgcctttgaaaagcaaggtttgtgctgcgcttccagttccgaaaagcagatgtttaagcccttggactgagggtgggatcgcagctccgaagacggagaggagggaaatggggccctttcccctctattgcatccccctgcccgactccttccccgcacccacgtgccctagattcatggcagaaaatgaccaaatcctgtgtatttgttttatatatttaataactgttttaaatgaaagttttagtaaaaaaaatacaaaacaaaaagattaaattgctattgctgtagtaagagaagctctttgtatctgaacatagttgtatttgaaatttgtggttttttaatttatttaaaattggggggagggcatgggaaggatttaacaccgatatattgttaccgctgaaaatgaactttatgaaccttttccaagttgatctatccagtgacgtggcctggtgggcgtttcttcttgtacttatgtggttttttggcttttaatacagacattttcctccaaaaaaaaaaaaaaaaagg

SEQ ID NO: 64 - protein, 150 aa, Homo sapiens
GRRTGRLRPAAAPSAAAATAGAPTALPAYPAAEPPGPLWLQGEPLHFCCLDFSLEELQGEPGWRLNRKPIESTLVACFMTLVIVVWSVAALIWPVPIIAGFLPNGMEQRRTTASTTAATPAAVPAGTTAAAAAAAAAAAAAAVTSGVATK

SEQ ID NO: 65 - DNA, 1521 bp, Homo sapiens
  modified_base (798)..(798): a, c, g, t, unknown or other
cggccgcggcccgggtccctcgcaaagccgctgccatcccggagggcccagccagcgggctcccggaggctggccgggcaggcgtggtgcgcggtaggagctgggcgcgcacggctaccgcgcgtggaggagacactgccctgccgcgatgggggcccggggcgctccttcacgccgtaggcaagcggggcggcggctgcggtacctgcccaccgggagctttcccttccttctcctgctgctgctgctctgcatccagctcgggggaggacagaagaaaaaggagaatcttttagctgaaaaagtagagcagctgatggaatggagttccagacgctcaatcttccgaatgaatggtgataaattccgaaaatttataaaggcaccacctcgaaactattccatgattgttatgttcactgctcttcagcctcagcggcagtgttctgtgtgcaggcaagctaatgaagaatatcaaatactggcgaactcctggcgctattcatctgctttttgtaacaagctcttcttcagtatggtggactatgatgaggggacagacgtttttcagcagctcaacatgaactctgctcctacattcaygcatttwcctccaaaaggcagacctaagagagctgatacttttgacctccaaagaattggatttgcagctgagcaactagcaaagtggattgctgacagaacggatgttcatattcgggttttcagaccacccaactactctggtaccattgctttggccctgttagtgtcgcttgttggaggtttgctttattngagaaggaacaacttggagttcatctataacaagactggttgggccatggtgtctctgtgtatagtctttgctatgacttctggccagatgtggaaccatatccgtggacctccatatgctcataagaacccacacaatggacaagtgagctacattcatgggagcagccaggctcagtttgtggcagaatcacacattattctggtactgaatgccgctatcaccatggggatggttcttctaaatgaagcagcaacttcgaaaggcgatgttggaaaaagacggataatttgcctagtgggattgggcctggtggtcttcttcttcagttttctactttcaatatttcgttccaagtaccacggctatccttatagtgatctggactttgagtgagaagatgtgatttggaccatggcacttaaaaactctataacctcagctttttaattaaatgaagccaagtgggatttgcataaagtgaatgtttaccatgaagataaactgttcctgactttatactattttgaattcattcatttcattgtgatcagctagcttattcttgtgtactttttttaaactgtgggttttcctagtaaatttaatttacagaaatcaatggtagcatttagtaatctacaaaggaaatatcaaagtgtttttcaagcctgttatatycagtgtgtkccacaggattgcaataaatgacaatgtaatta

SEQ ID NO: 66 - protein, 348 aa, Homo sapiens; identical to SEQ ID NO: 62
  MOD_RES (152)..(152): Variable amino acid
  MOD_RES (154)..(154): Variable amino acid
  MOD_RES (217)..(217): Variable amino acid

SEQ ID NO: 67 - DNA, 2306 bp, Homo sapiens
ggtttcatatgaactctcccgccacccgggaacagctggctgccaccgtttgtgttttccgagtttgtattcttgcaggtgaccaagatggagttttctggaagaaagcggaggaagctgaggttggcaggtgaccagaggaatgcttcctaccctcattgccttcagttttacttgcagccaccttctgaaaacatatctttaacagaatttgaaaacttggctattgatagagttaaattgttaaaatcagttgaaaatcttggagtgagctatgtgaaaggaactgaacaataccagagtaagttggagagtgagcttcggaagctcaagttttcctacagagagaagctagaagatgaatatgaaccacgaagaagagatcatatttctcattttattttgcggcttgcttattgccagtctgaagaacttagacgctggttcattcaacaagaaatggatctccttcgatttagatttagtattttacccaaggataaaattcaggatttcttaaaggatagccaattgcagtttgaggctataagtgatgaagagaagactcttcgagaacaggagattgttgcctcatcaccaagtttaagtggacttaagttggggttcgagtccatttataagatcccttttgctgatgctctggatttgtttcgaggaaggaaagtctatttggaagatggctttgcttacgtaccacttaaggacattgtggcaatcatcctgaatgaatttagagccaaactgtccaaggctttggcattaacagccaggtccttgcctgctgtgcagtctgatgaaagacttcagcctctgctcaatcacctcagtcattcctacactggccaagattacagtacccagggaaatgttgggaagatttctttagatcagattgatttgctttctaccaaatccttcccaccttgcatgcgtcagttacataaagccttgcgggaaaatcaccatcttcgtcatggaggccgaatgcagtatggcctatttctgaagggcattggtttaactttggaacaggcattgcagttctggaagcaagaatttatcaaaggaaagatggatccagacaagtttgataaaggttactcttacaacatccgtcacagctttggaaaggaaggcaagaggacagactatacacctttcagttgcctgaagattattctgtccaatccaccaagccaaggggattatcatgggtgcccattccgtcacagtgatccagagctgctgaagcaaaagttgcagtcatacaagatctctcctggagggataagccagattttggatttagtaaaggggacacattaccaggtagcctgtcaaaaatactttgagatgatacacaatgtggatgattgtggcttttctttgaatcatcctaatcagttcttttgtgagagccaacgtattctaaatggtggtaaagacataaagaaggaacctatccaaccagaaactcctcaacccaaaccaagtgtccagaaaaccaaggatgcatcatctgctctggcctctttaaattcctctctggaaatggatatggaaggactagaagattactttagtgaagattcttaggcagttttataaccctttttcctcaatagcctgtttcctgtttttaagattttgcctttgttgttgaaaaagggtttcactgtcaccaaggcttagtgcagtgacacaattacagctgattgcagccttgaccttcccagctcaagtgatcctcctacctcagcctcccaagtagttaggacacacaggtgtgcacctcatatccagataatttttttcaatttttttttgtagaggtggggggtctccctatgttgcccaggcagatctcagactcctgggctcaagcgatcctcacacctcagcgtcccagagtgctgggattacagttgtgagccactgtgcctggcctttttttttttttaaccttttcgtttaacttctctcttcactgcatcccaatccatctacaggcatgcacacttattaggaaaggaggtttgaggtaacaacagagactttcactatattttgctttgacagaaggaaagaggaggagtttctattaaaatctgtcacttgagtgatgtcatttaagtcctattttaggagataaaaacagctttggggactggttaaagtcccccagaaactacaataaagaacaacttttgttttaactcttaatcactttgtaattttgactcaatccttttctggaccatttttgttaataaatatcaaagtgt

SEQ ID NO: 68 - protein, 509 aa, Homo sapiens [sequence omitted]

SEQ ID NO: 69 - DNA, 1901 bp, Homo sapiens
aattcatacaggagagaagtcatatatatgcagtgattgtggaaaaggcttcatcaagaagtctcggctcattaatcatcagagagttcatacaggagagaaaccacatggatgcagcctgtgtgggaaggccttctccaaaaggtccaggctcactgaacaccagagaactcatacaggagagaagccctatgaatgcactgaatgtgacaaagcattccgctggaaatcacagctcaatgcacatcagaaagctcacacaggagagaagtcatatatatgccgtgattgtggaaaaggcttcattcagaagggaaatctcattgtacatcagcgaattcatactggagaaaaaccctatatatgcaatgaatgtggaaaaggcttcatccaaaagggcaacctccttattcatcgacgtactcacactggagagaaaccctatgaatgcaatgaatgtgggaaaggcttcagccagaagacatgtttaatatcccatcagagatttcacacaggaaagacaccctttgtatgtactgagtgtggaaaatcctgctcacacaagtcaggtctcattaaccaccagagaattcacacaggagagaaaccctatacatgcagtgactgtgggaaagctttcagagataaatcatgtctcaacagacatcggagaactcatacaggggagagaccgtatggatgctctgattgtgggaaagctttctcccacttgtcatgccttgtttatcataagggaatgctgcatgcaagagagaaatgtgtaggttcagtcaaattggaaaatccttgctcagagagtcatagcttatcacatacacgtgatctcatacaggataaagactctgttaacatggtgactctgcagatgccttctgtggcagctcagacctcattaactaacagtgcgttccaagcagagagcaaagtagccattgtgagccagcctgttgccagaagttcagtctcagcagatagtagaatttgcacagaataaaaaccatatgaatgcagtgaatgtggtagtgctttcagtgatcaattacatcatatgtcacaaaaaacacagaggaacaaactgatatattcaaggtggaaagcccttgaataaaaccttatggctaataagcatatactcagagaaaaatagtatgaagtggagactgggaaattcttttatgggaagatagatcttctcatcagtgaccatagatcacatcttcagtgagcttatagttggtagaaatataatgatcatggaaaagtccttgttcagaaacagtacgccagtaggtatcagggggtttacacaggagagaaacttttggaagacctttgaaggctatgaatgtggcagggttgctagtggtacattctgccttatcctcagagggaatcatatagaaataaaactatgaaaatgtaactagaacatcttcatcaaaatatgaaagaacacacgaagcaaataagccctgtgaaaaggagtattttagagatttcgatcagaaatctaacatcattatatggcagataatatacaggatgtgtattttaggacaatataccttgaatcactagttgatatgtcaatgactaattaaaaggggttgtcagtgttacacatcattggttaaatttatagcacaatgtacctcttcccccttttttgataagagtcttctattcccaaccaagatcattatatgattagctcttgtgtttctttgattccaaatttcttcacttgttatttcagactactgaagctcttcaaaaggaaaaatgtatttaatttaataatgtaacacaacaagtttggatgtgtttaactttataaataatcaccccagaggaatgaagttcaaaacttgtgaataacc

SEQ ID NO: 70 - protein, 127 aa, Homo sapiens
MDAACVGRPSPKGPGSLNTRELIQERSPMNALNVTKHSAGNHSSMHIRKLTQERSHIYAVIVEKASFRREISLYISEFILEKNPIYAMNVEKASSKRATSLFIDVLTLERNPMNAMNVGKASARRHV

SEQ ID NO: 71 - DNA, 1005 bp, Homo sapiens
aatttcggcacgggggggaggcacagtgagtccactggggcacggcagcgtctaagccacaagccgactgacataagccaggtcctaacggagcctatgtgtaagtccactactggtgcaaggttgcacacttctaagaagagcggcgtggggggctcggcgaccttcgcttcagtcgctcccccgtgcagtcccctgtgcccaagacacagcctgatgcttgtgctccggtgggcggacttggaggcggcgggaactgcaattggtggctttgaagggcggcgagcgggaacagctcttgaggagtgagactgcaggagatgtgggccgtgccaaagagatggatgagactgttgctgagttcatcaagaggaccatcttgaaaatccccatgaatgaactgacaacaatcctgaaggcctgggattttttgtctgaaaatcaactgcagactgtaaatttccgacagagaaaggaatctgtagttcagcacttgatccatctgtgtgaggaaaagcgtgcaagtatcagtgatgctgccctgttagacatcatttatatgcaatttcatcagcaccagaaagtttgggatgtttttcagatgagtaaaggaccaggtgaagatgttgacctttttgatatgaaacaatttaaaaattcgttcaagaaaattcttcagagagcattaaaaaatgtgacagtcagcttcagagaaactgaggagaatgcagtctggattcgaattgcctggggaacacagtacacaaagccaaaccagtacaaacctacctacgtggtgtactactcccagactccgtacgccttcacgtcctcctccatgctgaggcgcaatacaccgcttctgggtcaggagttagaagctactgggaaaatctacctccgacaagaggagatcattttagatattaccgaaatgaagaaagcttgcaattagtgaacatgaaaggaaaataaaaattcctcacagtcaaaaaaaaaaaaaaa

SEQ ID NO: 72 - protein, 204 aa, Homo sapiens
MDETVAEFIKRTILKIPMNELTTILKAWDFLSENQLQTVNFRQRKESVVQHLIHLCEEKRASISDAALLDIIYMQFHQHQKVWDVFQMSKGPGEDVDLFDMKQFKNSFKKILQRALKNVTVSFRETEENAVWIRIAWGTQYTKPNQYKPTYVVYYSQTPYAFTSSSMLRRNTPLLGQELEATGKIYLRQEEIILDITEMKKACN

SEQ ID NO: 73 - DNA, 1125 bp, Homo sapiens
atggtgctgtgggagtccccgcggcagtgcagcagctggacactttgcgagggcttttgctggctgctgctgctgcccgtcatgctactcatcgtagcccgcccggtgaagctcgctgctttccctacctccttaagtgactgccaaacgcccaccggctggaattgctctggttatgatgacagagaaaatgatctcttcctctgtgacaccaacacctgtaaatttgatggggaatgtttaagaattggagacactgtgacttgcgtctgtcagttcaagtgcaacaatgactatgtgcctgtgtgtggctccaatggggagagctaccagaatgagtgttacctgcgacaggctgcatgcaaacagcagagtgagatacttgtggtgtcagaaggatcatgtgccacagatgcaggatcaggatctggagatggagtccatgaaggctctggagaaactagtcaaaaggagacatccacctgtgatatttgccagtttggtgcagaatgtgacgaagatgccgaggatgtctggtgtgtgtgtaatattgactgttctcaaaccaacttcaatcccctctgcgcttctgatgggaaatcttatgataatgcatgccaaatcaaagaagcatcgtgtcagaaacaggagaaaattgaagtcatgtctttgggtcgatgtcaagataacacaactacaactactaagtctgaagatgggcattatgcaagaacagattatgcagagaatgctaacaaattagaagaaagtgccagagaacaccacataccttgtccggaacattacaatggcttctgcatgcatgggaagtgtgagcattctatcaatatgcaggagccatcttgcaggtgtgatgctggttatactggacaacactgtgaaaaaaaggactacagtgttctatacgttgttcccggtcctgtacgatttcagtatgtcttaatcgcagctgtgattggaacaattcagattgctgtcatctgtgtggtggtcctctgcatcacaaggaaatgccccagaagcaacagaattcacagacagaagcaaaatacagggcactacagttcagacaatacaacaagagcgtccacgaggttaatctga

SEQ ID NO: 74 - protein, 374 aa, Homo sapiens
MVLWESPRQCSSWTLCEGFCWLLLLPVMLLIVARPVKLAAFPTSLSDCQTPTGWNCSGYDDRENDLFLCDTNTCKFDGECLRIGDTVTCVCQFKCNNDYVPVCGSNGESYQNECYLRQAACKQQSEILVVSEGSCATDAGSGSGDGVHEGSGETSQKETSTCDICQFGAECDEDAEDVWCVCNIDCSQTNFNPLCASDGKSYDNACQIKEASCQKQEKIEVMSLGRCQDNTTTTTKSEDGHYARTDYAENANKLEESAREHHIPCPEHYNGFCMHGKCEHSINMQEPSCRCDAGYTGQHCEKKDYSVLYVVPGPVRFQYVLIAAVIGTIQIAVICVVVLCITRKCPRSNRIHRQKQNTGHYSSDNTTRASTRLI

SEQ ID NO: 75 - DNA, 2068 bp, Homo sapiens
  modified_base (143)..(143): a, c, g, t, unknown or other
ggcgccgggattgggagggcttcttgcaggctgctgggctggggctaagggctgctcagtttccttcagcggggcactgggaagcgccatggcactgcagggcatctcggtcgtggagctgtccggcctggccccgggccgtntctgtgctatggtcctggctgacttcggggcgcgtgtggtacgcgtggaccggcccggctcccgctacgacgtgagccgcttgggccggggcaagcgctcgctagtgctggacctgaagcagccgcgggagccgcgtgctgcggcgtctgtgcaagcggtcggatgtgctgctggagcccttccgccgcggtgtcatggagaaactccagctgggcccagagattctgcagcgggaaaatccaaggcttatttatgccaggctgagtggatttggccagttcaggaaagcttctgccggttagctggccacgatatcaactatttggctttgtcaggtgttctctcaaaaattggcagaagtggtgagaatccgtatgccccgctgaatctcgtggctgactttgctggtggtggccttatgtgtgcactgggcattataatggctctttttgaccgcacacgcactgacaagggtcaggtcattgatgcaaatatggtggaaggaacagcatatttaagttcttttctgtggaaaactcagaaatcgagtctgtgggaagcacctcgaggacagaacatgttggatggtggagcacctttctatacgacttacaggacagcagatggggaattcatggctgttggagcaatagaaccccagttctacgagctgctgatcaaaggacttggactaaagtctgatgaacttcccaatcagatgagcacggatgattggccagaaatgaagaagaagtttgcagatgtatttgcaaagaagacgaaggcagagtggtgtcaaatctttgacggcacagatgcctgtgtgactccggttctgacttttgaggaggttgttcatcatgatcacaacaaggaacggggctcgtttatcaccagtgaggagcaggacgtgagcccccgccttgcacctctgctgttaaacaccccagccatcccttcttccaaaggggatcctttcataggagaacacactgaggagatacttgaagaatttggattcagccgagaagagatttatcagcttaactcagataaaatcattgaaagtaataaggtaaaagctagtctctaacttccaggcccacggctcaagtgaatttgaatactgcatttacagtgtagagtaacacataacattgtatgcatggaaacatggaggaacagtattacagtgtcctaccactctaatcaagaaaagaattacagactctgattctacagtgatgattgaattctaaaaatggttatcattagggcttttgatttataaaactttgggtacttatactaaattatggtagttattctgccttccagtttgcttgatatatttgttgatattaagattcttgacttatattttgaatgggttctagtgaaaaaggaatgatatattcttgaagacatcgatatacatttatttacactcttgattctacaatgtagaaaatgaggaaatgccacaaattgtatggtgataaaagtcacgtgaaacagagtgattggttgcatccaggccttttgtcttggtgttcatgatctccctctaagcacattccaaactttagcaacagttatcacactttgtaatttgcaaagaaaagtttcacctgtattgaatcagaatgccttcaactgaaaaaaacatatccaaaataatgaggaaatgtgttggctcactacgtagagtccagagggacagtcagttttagggttgcctgtatccagtaactcggggcctgtttccccgtgggtctctgggctgtcagctttcctttctccatgtgtttgatttctcctcaggctggtagcaagttctggatcttatacccaacacacagcaacatccagaaataaagatctcaggaccccccaaaaaaaaaaaaaaaaaaaaaaaaaaaaa

SEQ ID NO: 76 - protein, 382 aa, Homo sapiens
  MOD_RES (19)..(19): Variable amino acid
MALQGISVVELSGLAPGRXCAMVLADFGARVVRVDRPGSRYDVSRLGRGKRSLVLDLKQPREPRAAASVQAVGCAAGALPPRCHGETPAGPRDSAAGKSKAYLCQAEWIWPVQESFCRLAGHDINYLALSGVLSKIGRSGENPYAPLNLVADFAGGGLMCALGIIMALFDRTRTDKGQVIDANMVEGTAYLSSFLWKTQKSSLWEAPRGQNMLDGGAPFYTTYRTADGEFMAVGAIEPQFYELLIKGLGLKSDELPNQMSTDDWPEMKKKFADVFAKKTKAEWCQIFDGTDACVTPVLTFEEVVHHDHNKERGSFITSEEQDVSPRLAPLLLNTPAIPSSKGDPFIGEHTEEILEEFGFSREEIYQLNSDKIIESNKVKASL

SEQ ID NO: 77 - DNA, 5685 bp, Homo sapiens
gttaaatccttactttaccagattcttgatggtatccattacctccatgcaaattgggtgcttcacagagacttgaaaccagcaaatatcctagtaatgggagaaggtcctgagagggggagagtcaaaatagctgacatgggttttgccagattattcaattctcctctaaagccactagcagatttggatccagtagttgtgacattttggtatcgggctccagaacttttgcttggtgcaaggcattatacaaaggccattgatatatgggcaataggttgtatatttgctgaattgttgacttcggaacctatttttcactgtcgtcaggaagatataaaaacaagcaatccctttcatcatgatcaactggatcggatatttagtgtcatggggtttcctgcagataaagactgggaagatattagaaagatgccagaatatcccacacttcaaaaagactttagaagaacaacgtatgccaacagtagcctcataaagtacatggagaaacacaaggtcaagcctgacagcaaagtgttcctcttgcttcagaaactcctgaccatggatccaaccaagagaattacctcggagcaagctctgcaggatccctattttcaggaggaccctttgccaacattagatgtatttgccggctgccagattccataccccaaacgagaattccttaatgaagatgatcctgaagaaaaaggtgacaagaatcagcaacagcagcagaaccagcatcagcagcccacagcccctccacagcaggcagcagcccctccacaggcgcccccaccacagcagaacagcacccagaccaacgggaccgcaggtggggctggggccggggtcgggggcaccggagcagggttgcagcacagccaggactccagcctgaaccaggtgcctccaaacaagaagccacggctagggccttcaggcgcaaactcaggtggacctgtgatgccctcggattatcagcactccagttctcgcctgaattaccaaagcagcgttcagggatcctctcagtcccagagcacacttggctactcttcctcgtctcagcagagctcacagtaccacccatctcaccaggcccaccggtactgaccagctcccgttgggccaggccagcccagcccagagcacaggctccagcaatatgtctgcattgaaaagaaccaaaaaaatgcaaactatgatgccatttaaaactcatacacatgggaggaaaaccttatatactgagcattgtgcaggactgatagctcttctttattgacttaaagaagattcttgtgaagtttccccagcaccccttccctgcatgtgttccattgtgacttctctgataaagcgtctgatctaatcccagcacttctgtaaccttcagcatttctttgaaggatttcctggtgcacctttctcatgctgtagcaatcactatggtttatcttttcaaagctcttttaataggattttaatgttttagaaacaggattccagtggtgtatagttttatacttcatgaactgatttagcaacacaggtaaaaatgcaccttttaaagcactacgttttcacagacaataactgttctgctcatggaagtcttaaacagaaactgttactgtcccaaagtactttactattacgttcgtatttatctagtttcagggaaggtctaataaaaagacaagcggtgggacagagggaacctacaaccaaaaactgcctagatctttgcagttatgtgctttatgccacgaagaactgaagtatgtggtaatttttatagaatcattcatatggaactgagttcccagcatcatcttattctgaatagcattcagtaattaagaattacaattttaaccttcatgtagctaagtctaccttaaaaagggtttcaagagctttgtacagtctcgatggcccacaccaaaacgctgaagagagtaacaactgcactaggatttctgtaaggagtaattttgatcaaaagacgtgttacttccctttgaaggaaaagtttttagtgtgtattgtacataaagtcggcttctctaaagaaccattggtttcttcacatctgggtctgcgtgagtaactttcttgcataatcaaggttactcaagtagaagcctgaaaattaatctgcttttaaaataaagagcagtgttctccattcgtatttgtattagatatagagtgactatttttaaagcatgttaaaaatttaggttttattcatgtttaaagtatgtattatgtatgcataattttgctgttgttactgaaacttaattctatcaagaatctttttcattgcactgaatgatttcttttgcccctaggagaaaacttaataattgtgcctaaaaactatgggcggatagtataagactatactagacaaagtgaatatttgcatttccattatctatgaattagtggctgagttctttcttagctgctttaaggagcccctcactccccagagtcaaaaggaaatgtaaaaacttagagctcccattgtaatgtaaggggcaagaaatttgtgttcttctgaatgctactagcagcaccagccttgttttaaatgttttcttgagctagaagaaatagctgattattgtatatgcaaattacatgcatttttaaaaactattctttctgaacttatctacctggttatgatactgtgggtccatacacaagtaaaataagattagacagaagccagtatacattttgcactattgatgtgatactgtagccagccaggaccttactgatctcagcataataatgctcactaataatgaagtctgcatagtgacactcatcaagactgaagatgaagcaggttacgtgctccattggaaggagtttctgatagtctcctgctgttttaccccttccattttttaaaataagaaattagcagccctctgcataatgtagctgcctatatgcagttttatcctgtgccctaaagcctcactgtccagagctgttggtcatcagatgcttattgcaccctcaccatgtgcctggtgccctgctgggtagagaacacagaggacagggcatacttcttgtccttaaggagcttgtgatctgtgacagtaagccctcctgggatgtctgtgccatgtgattgacttacaagtgaaactgtcttataatatgaaggtctttttgtttacttctaaacccacttgggtagttactatccccaaatctgttctgtaaataatattatggaagggtttctatgtcagtctaccttagagaaagccagtgattcaatatcacaaaaggcattgacgtatctttgaaatgttcacagcagccttttaacaacaactgggtggtccttgtaggcagaacatactctcctaagtggttgtaggaaattgcaaggaaaatagaaggtctgttcttgctctcaaggaggttacctttaataaaagaagacaaacccagatagatatgtaaaccaaaatactatgccccttaatactttataagcagcattgttaaatagttcttacgcttatacattcacagaactaccctgttttccttgtatataatgacttttgctggcagaactgaaatataaactgtaaggggatttcgtcagttgctcccagtatacaatatcctccaggacatagccagaaatctccattccacacatgactgagttcctatccctgcactggtactggctcttttctcctctttccttgcctcagggttcgtgctacccactgattccctttacccttagtaataattttggatcattttctttcctttaaaggggaacaaagccttttttttttttgagacggagtgttgctctgtcacccaagctggagtgcagtggcacgatcttggctcactccaacctccaccttccaggttcaagtgattctcctgcctcagcctcccgagtagctgggactacgggcacgcaccaccacgtctggctaatttttgtatttttagtagagatggggtttcaccctattggtcaggctggtcttgaattcctcacctcaggtcatccgcctgtctcggcctcccgaagtgctgggattataggtgtgagccaccgcacccagttgggaacaaagcctttttaacacacgtaagggccctcaaaccgtgggacctctaaggagacctttgaagctttttgagggcaaactttacctttgtggtccccaaatgatggcatttctctttgaaatttattagatactgttatgtcccccaagggtacaggaggggcatccctcagcctatgggaacacccaaactaggaggggttattgacaggaaggaatgaatccaagtgaaggctttctgctcttcgtgttacaaaccagtttcagagttagctttctggggaggtgtgtgtttgtgaaaggaattcaagtgttgcaggacagatgagctcaaggtaaggtagctttggcagcagggctgatactatgaggctgaaacaatccttgtgatgaagtagatcatgcagtgacatacaaagaccaaggattatgtatatttttatatctctgtggttttgaaactttagtacttagaattttggccttctgcactactcttttgctcttacgaacataatggactcttaagaatggaaagggatgacatttacctatgtgtgctgcctcattcctggtgaagcaactgctacttgttctctatgcctctaaaatgatgctgttttctctgctaaaggtaaaagaaaagaaaaaaatagttggaaaataagacatgcaacttgatgtgcttttgagtaaatttatgcagcagaaactatacaatgaaggaagaattctatggaaattacaaatccaaaactctatgatgatgtcttcctagggagtagagaaaggcagtgaaatggcagttagaccaacagaggcttgaaggattcaagtacaagtaatattttgtataaaacatagcagtttaggtccccataatcctcaaaaatagtcacaaatataacaaagttcattgttttagggtttttaaaaaacgtgttgtacctaaggccatacttactcttctatgctatcactgcaaaggggtgatatgtatgtattatataaaaaaaaaaacccttaatgcactgttatctcctaaatatttagtaaattaatactatttaatttttttaaagatttgtctgtgtagacactaaaagtattacacaaaatctggactgaaggtgtcctttttaacaacaatttaaagtactttttatatatgttatgtagtatatcctttctaaactgcctagtttgtatattcctataattcctatttgtgaagtgtacctgttcttgtctcttttttcagtcattttctgcacgcatccccctttatatggttatagagatgactgtagcttttcgtgctccactgcgaggtttgtgctcagagccgctgcaccccagcgaggcctgctccatggagtgcaggacgagctactgctttggagcgagggtttcctgcttttgagttgacctgacttccttcttgaaatgactgttaaaactaaaataaattacattgcatttattttatattcttggttgaaataaaatttaattgactttg

SEQ ID NO: 78 - protein, 375 aa, Homo sapiens
VKSLLYQILDGIHYLHANWVLHRDLKPANILVMGEGPERGRVKIADMGFARLFNSPLKPLADLDPVVVTFWYRAPELLLGARHYTKAIDIWAIGCIFAELLTSEPIFHCRQEDIKTSNPFHHDQLDRIFSVMGFPADKDWEDIRKMPEYPTLQKDFRRTTYANSSLIKYMEKHKVKPDSKVFLLLQKLLTMDPTKRITSEQALQDPYFQEDPLPTLDVFAGCQIPYPKREFLNEDDPEEKGDKNQQQQQNQHQQPTAPPQQAAAPPQAPPPQQNSTQTNGTAGGAGAGVGGTGAGLQHSQDSSLNQVPPNKKPRLGPSGANSGGPVMPSDYQHSSSRLNYQSSVQGSSQSQSTLGYSSSSQQSSQYHPSHQAHRY

SEQ ID NO: 79 - DNA, 2190 bp, Homo sapiens
atgaatcctttccagaaaaatgagtccaaggaaactcttttttcacctgtctccattgaagaggtaccacctcgaccacctagccctccaaagaagccatctccgacaatctgtggctccaactatccactgagcattgccttcattgtggtgaatgaattctgcgagcgcttttcctattatggaatgaaagctgtgctgatcctgtatttcctgtatttcctgcactggaatgaagatacctccacatctatataccatgccttcagcagcctctgttattttactcccatcctgggagcagccattgctgactcgtggttgggaaaattcaagacaatcatctatctctccttggtgtatgtgcttggccatgtgatcaagtccttgggtgccttaccaatactgggaggacaagtggtacacacagtcctatcattgatcggcctgagtctaatagctttggggacaggaggcatcaaaccctgtgtggcagcttttggtggagaccagtttgaagaaaaacatgcagaggaacggactagatacttctcagtcttctacctgtccatcaatgcagggagcttgatttctacatttatcacacccatgctgagaggagatgtgcaatgttttggagaagactgctatgcattggcttttggagttccaggactgctcatggtaattgcacttgttgtgtttgcaatgggaagcaaaatatacaataaaccaccccctgaaggaaacatagtggctcaagttttcaaatgtatctggtttgctatttccaatcgtttcaagaaccgttctggagacattccaaagcgacagcactggctagactgggcagctgagaaatatccaaagcagctcattatggatgtaaaggcactgaccagggtactattcctttatatcccattgcccatgttctgggctcttttggatcagcagggttcacgatggactttgcaagccatcaggatgaataggaatttggggttttttgtgcttcagccggaccagatgcaggttctaaatccctttctggttcttatcttcatcccgttgtttgactttgtcatttatcgtctggtctccaagtgtggaattaacttctcatcacttaggaaaatggctgttggtatgatcctagcgtgcctggcatttgcagttgcggcagctgtagagataaaaataaatgaaatggccccagcccagtcaggtccccaggaggttttcctacaagtcttgaatctggcagatgatgaggtgaaggtgacagtggtgggaaatgaaaacaattctctgttgatagagtccatcaaatcctttcagaaaacaccacactattccaaactgcacctgaaaacaaaaagccaggattttcacttccacctgaaatatcacaatttgtctctctacactgagcattctgtgcaggagaagaactggtacagtcttgtcattcgtgaagatgggaacagtatctccagcatgatggtaaaggatacagaaagcaaaacaaccaatgggatgacaaccgtgaggtttgttaacactttgcataaagatgtcaacatctccctgagtacagatacctctctcaatgttggtgaagactatggtgtgtctgcttatagaactgtgcaaagaggagaataccctgcagtgcactgtagaacagaagataagaacttttctctgaatttgggtcttctagactttggtgcagcatatctgtttgttattactaataacaccaatcagggtcttcaggcctggaagattgaagacattccagccaacaaaatgtccattgcgtggcagctaccacaatatgccctggttacagctggggaggtcatgttctctgtcacaggtcttgagttttcttattctcaggctccctctagcatgaaatctgtgctccaggcagcttggctattgacaattgcagttgggaatatcatcgtgcttgttgtggcacagttcagtggcctggtacagtgggccgaattcattttgttttcctgcctcctgctggtgatctgcctgatcttctccatcatgggctactactatgttcctgtaaagacagaggatatgcggggtccagcagataagcacattcctcacatccaggggaacatgatcaaactagagaccaagaagacaaaactctga

SEQ ID NO: 80 - protein, 729 aa, Homo sapiens [sequence omitted]

SEQ ID NO: 81 - DNA, 1221 bp, Homo sapiens
atggacggatcccacagcgcagccctgaagctgcagcagctgcctcccacaagtagctccagcgccgtaagcgaggcctccttctcctacaaggaaaacctgattggcgccctcttggcgatcttcgggcacctcgtggtcagcattgcacttaacctccagaagtactgccacatccgcctggcaggctccaaggatccccgggcctatttcaagaccaagacatggtggctgggcctgttcctgatgcttctgggcgagctgggtgtgttcgcctcctacgccttcgcgccgctgtcactcatcgtgcccctcagcgcagtttctgtgatagctagtgccatcataggaatcatattcatcaaggaaaagtggaaaccgaaagactttctgaggcgctacgtcttgtcctttgttggctgcggtttggctgtcgtgggtacctacctgctggtgacattcgcacccaacagtcacgagaagatgacaggcgagaatgtcaccaggcacctcgtgagctggcctttccttttgtacatgctggtggagatcattctgttctgcttgctgctctacttctacaaggagaagaacgccaacaacattgtcgtgattcttctcttggtggcgttacttggctccatgacagtggtgacagtcaaggccgtggctgggatgcttgtcttgtccattcaagggaacctgcagcttgactaccccatcttctacgtgatgttcgtgtgcatggtggcaaccgccgtctatcaggctgcgtttttgagtcaagcctcacagatgtacgactcctctttgattgccagtgtgggctacattctgtccacaaccattgctatcacagcaggtgcaatattttacctggacttcatcggggaggacgtgctgcacatctgcatgtttgcactggggtgcctcattgcattcttgggcgtcttcttaatcacgcgtaacaggaagaagcccattccatttgagccctatatttccatggatgccatgccaggtatgcagaacatgcacgataaagggatgactgtccagcctgaacttaaagcttctttttcctatggggctctggaaaacaatgacaacatttctgagatctacgctcctgccaccctgccagtcatgcaagaagagcacggctccagaagtgcctctggggtcccctaccgagtcctagagcacaccaagaaggaatga

SEQ ID NO: 82 - protein, 406 aa, Homo sapiens
MDGSHSAALKLQQLPPTSSSSAVSEASFSYKENLIGALLAIFGHLVVSIALNLQKYCHIRLAGSKDPRAYFKTKTWWLGLFLMLLGELGVFASYAFAPLSLIVPLSAVSVIASAIIGIIFIKEKWKPKDFLRRYVLSFVGCGLAVVGTYLLVTFAPNSHEKMTGENVTRHLVSWPFLLYMLVEIILFCLLLYFYKEKNANNIVVILLLVALLGSMTVVTVKAVAGMLVLSIQGNLQLDYPIFYVMFVCMVATAVYQAAFLSQASQMYDSSLIASVGYILSTTIAITAGAIFYLDFIGEDVLHICMFALGCLIAFLGVFLITRNRKKPIPFEPYISMDAMPGMQNMHDKGMTVQPELKASFSYGALENNDNISEIYAPATLPVMQEEHGSRSASGVPYRVLEHTKKE

SEQ ID NO: 83 - DNA, 1316 bp, Homo sapiens
cactcattaagaacagaggaggctgcctgttactcctggtgttgcatccctccagacactctgctgtttcctgcctaggcgtggctgcagccatggctaggaaagcgctgccacccacccacctgggccagagctggttctgctcctgctgcagggacactgagctggctatctcggcgcttcgggcaagaactgcaacaggctctcctgggtcctgcaggtgtacagccgggcccctgccttgtgcctcagctctcgagagctgctgctgccgggtgacctgatccaacctgataaggtgccatcttcagctaccactgcaaggccctgagggcaacagcagcacggcactgcccacccggctgctgatggcctggtgccagctgggagtcctcccggcacttcgaggccactgagccacccttccagccccagcccaccatggacaggggtatccagcttcctcctcaacctcgtcctctgcccctgagccagtgacgcccaaggacatgcctgttacccaggtcctgtaccagcactagctggtcaagggcatgacagtgctggaggccgtcttggagatccaggccatcactggcagcaggctgctctccatggtgccagggcccgccaggccaccaggctcatgctgggacccaacccagtgcacaaggacttggctgctgagccacacacccaggagaaggtggataagtgggctaccaagggcttcctgcaggctaggggaggagccacccccgcttccctattgtgaccaggcctatggggaggagctgtccatacgccaccgtgagacctgggcctggctctcaaggacagacaccgcctggcctggtgctccaggggtgaagcaggccagaatcctgggggagctgctcctggtttgagctgcattcaggaagtgcgggacatggtaggggaggcaaaaagccttgggcactaccctccctgtggagctgttcggtgtccgtcgagctagccacaccctgacaccatgttcaagggtaccggaagagaagggtgtctgcccccaacctcccctgtgggtgtcactggccagatgtcatgagggaagcaggccttgtgagtggacactgaccatgagtccctggggggagtgatcccccaggcatcgtgtgccatgttgcacttctgcccaggcagcagggtgggtgggtaccatgggtgcccacccctccaccacatggggccccaaagcactgcaggccaagcagggcaaccccacacccttgacataaaagcatcttgaagcttttaaaaaaaaaaaaaaaaaa

SEQ ID NO: 84 - protein, 117 aa, Homo sapiens
MTVLEAVLEIQAITGSRLLSMVPGPARPPGSCWDPTQCTRTWLLSHTPRRRWISGLPRASCRLGEEPPPLPYCDQAYGEELSIRHRETWAWLSRTDTAWPGAPGVKQARILGELLLV

SEQ ID NO: 85 - DNA, 3442 bp, Homo sapiens
agccggtgcgccgcagactagggcgcctcgggccagggagcgcggaggagccatggccaccgctaacggggccgtggaaaacgggcagccggacgggaagccgccggccctgccgcgccccatccgcaacctggaggtcaagttcaccaagatatttatcaacaatgaatggcacgaatccaagagtgggaaaaagtttgctacatgtaacccttcaactcgggagcaaatatgtgaagtggaagaaggagataagcccgacgtggacaaggctgtggaggctgcacaggttgccttccagaggggctcgccatggcgccggctggatgccctgagtcgtgggcggctgctgcaccagctggctgacctggtggagagggaccgcgccaccttggccgccctggagacgatggatacagggaagccatttcttcatgcttttttcatcgacctggagggctgtattagaaccctcagatactttgcagggtgggcagacaaaatccagggcaagaccatccccacagatgacaacgtcgtatgcttcaccaggcatgagcccattggtgtctgtggggccatcactccatggaacttccccctgctgatgctggtgtggaagctggcacccgccctctgctgtgggaacaccatggtcctgaagcctgcggagcagacacctctcaccgccctttatctcggctctctgatcaaagaggccgggttccctccaggagtggtgaacattgtgccaggattcgggcccacagtgggagcagcaatttcttctcaccctcagatcaacaagatcgccttcaccggctccacagaggttggaaaactggttaaagaagctgcgtcccggagcaatctgaagcgggtgacgctggagctgggggggaagaacccctgcatcgtgtgtgcggacgctgacttggacttggcagtggagtgtgcccatcagggagtgttcttcaaccaaggccagtgttgcacggcagcctccagggtgttcgtggaggagcaggtctactctgagtttgtcaggcggagcgtggagtatgccaagaaacggcccgtgggagaccccttcgatgtcaaaacagaacaggggcctcagattgatcaaaagcagttcgacaaaatcttagagctgatcgagagtgggaagaaggaaggggccaagctggaatgcgggggctcagccatggaagacaaggggctcttcatcaaacccactgtcttctcagaagtcacagacaacatgcggattgccaaagaggagattttcgggccagtgcaaccaatactgaagttcaaaagtatcgaagaagtgataaaaagagcgaatagcaccgactatggactcacagcagccgtgttcacaaaaaatctcgacaaagccctgaagttggcttctgccttagagtctggaacggtctggatcaactgctacaacgccctctatgcacaggctccatttggtggctttaaaatgtcaggaaatggcagagaactaggtgaatacgctttggccgaatacacagaagtgaaaactgtcaccatcaaacttggcgacaagaacccctgaaggaaaggcggggctccttcctcaaacatcggacggcggaatgtggcagatgaaatgtgctggaggaaaaaaatgacatttctgaccttcccgggacacattcttctggaggctttacatctactggagttgaatgattgctgttttcctctcactctcctgtttattcaccagactggggatgcctataggttgtctgtgaaatcgcagtcctgcctggggagggagctgttggccatttctgtgtttccctttaaaccagatcctggagacagtgagatactcagggcgttgttaacagggagtggtatttgaagtgtccagcagttgcttgaaatgctttgccgaatctgactccagtaagaatgtgggaaaaccccctgtgtgttctgcaagcagggctcttgcaccagcggtctcctcagggtggacctgcttacagagcaagccacgcctctttccgaggtgaaggtgggaccattccttgggaaaggattcacagtaaggttttttggtttttgttttttgttttcttgtttttaaaaaaaggatttcacagtgagaaagttttggttagtgcataccgtggaagggcgccagggtctttgtggattgcatgttgacattgaccgtgagattcggcttcaaaccaatactgcctttggaatatgacagaatcaatagcccagagagcttagtcaaagacgatatcacggtctaccttaaccaaggcactttcttaagcagaaaatattgttgaggttacctttgctgctaaagatccaatcttctaacgccacaacagcatagcaaatcctaggataattcacctcctcatttgacaaatcagagctgtaattcactttaacaaattacgcatttctatcacgttcactaacagcttatgataagtctgtgtagtcttccttttctccagttctgttacccaatttagattagtaaagcgtacacaactggaaagactgctgtaataacacagccttgttatttttaagtcctattttgatattaatttctgattagttagtaaataacacctggattctatggaggacctcggtcttcatccaagtggcctgagtatttcactggcaggttgtgaatttttcttttcctctttgggaatccaaatgatgatgtgcaatttcatgttttaacttgggaaactgaaagtgttcccatatagcttcaaaaacaaaaacaaatgtgttatccgacggatacttttatggttactaactagtactttcctaattgggaaagtagtgcttaagtttgcaaattaagttggggagggcaataataaaatgagggcccgtaacagaaccagtgtgtgtataacgaaaaccatgtataaaatgggcctatcacccttgtcagagatataaattaccacatttggcttcccttcatcagctaacacttatcacttatactaccaataacttgttaaatcaggatttggcttcatacactgaattttcagtattttatctcaagtagatatagacactaaccttgatagtgatacgttagagggttcctattcttccattgtacgataatgtctttaatatgaaatgctacattatttataattggtagagttattgtatctttttatagttgtaagtacacagaggtggtatatttaaacttctgtaatatactgtatttagaaatggaaatatatatagtgttaggtttcacttcttttaaggtttacccctgtggtgtggtttaaaaatctataggcctgggaattccgatcctagctgcagatcgcatcccacaatgcgagaatgataaaataaaattggatatttgaga

SEQ ID NO: 86 - protein, 512 aa, Homo sapiens
MATANGAVENGQPDGKPPALPRPIRNLEVKFTKIFINNEWHESKSGKKFATCNPSTREQICEVEEGDKPDVDKAVEAAQVAFQRGSPWRRLDALSRGRLLHQLADLVERDRATLAALETMDTGKPFLHAFFIDLEGCIRTLRYFAGWADKIQGKTIPTDDNVVCFTRHEPIGVCGAITPWNFPLLMLVWKLAPALCCGNTMVLKPAEQTPLTALYLGSLIKEAGFPPGVVNIVPGFGPTVGAAISSHPQINKIAFTGSTEVGKLVKEAASRSNLKRVTLELGGKNPCIVCADADLDLAVECAHQGVFFNQGQCCTAASRVFVEEQVYSEFVRRSVEYAKKRPVGDPFDVKTEQGPQIDQKQFDKILELIESGKKEGAKLECGGSAMEDKGLFIKPTVFSEVTDNMRIAKEEIFGPVQPILKFKSIEEVIKRANSTDYGLTAAVFTKNLDKALKLASALESGTVWINCYNALYAQAPFGGFKMSGNGRELGEYALAEYTEVKTVTIKLGDKNP

SEQ ID NO: 87 - DNA, 2252 bp, Homo sapiens
gaccattagcaggcacccaggcctgtctttggctcggaaacggtggcccccaatgtagcctagtttgaacctaggaactgcaggaccagagagattccactggagcctgatggacgggtgacagagggaaccctactctggaaactgtcagtcccagggcactggggagggctgaggccgaccatgcccagcctgctgctgctgttcacggctgctctgctgtccagctgggctcagcttctgacagacgccaactcctggtggtcattagctttgaacccggtgcagagacccgagatgtttatcatcggtgcccagcccgtgtgcagtcagcttcccgggctctcccctggccagaggaagctgtgccaattgtaccaggagcacatggcctacataggggagggagccaagactggcatcaaggaatgccagcaccagttccggcagcggcggtggaattgcagcacagcggacaacgcatctgtctttgggagagtcatgcagataggcagccgagagaccgccttcacccacgcggtgagcgccgcgggcgtggtcaacgccatcagccgggcctgccgcgagggcgagctctccacctgcggctgcagccggacggcgcggcccaaggacctgccccgggactggctgtggggcggctgtggggacaacgtggagtacggctaccgcttcgccaaggagtttgtggatgcccgggagcgagagaagaactttgccaaaggatcagaggagcagggccgggtgctcatgaacctgcaaaacaacgaggccggtcgcagggctgtgtataagatggcagacgtagcctgcaaatgccacggcgtctcggggtcctgcagcctcaagacctgctggctgcagctggccgagttccgcaaggtcggggaccggctgaaggagaagtacgacagcgcggccgccatgcgcgtcacccgcaagggccggctggagctggtcaacagccgcttcacccagcccaccccggaggacctggtctatgtggaccccagccccgactactgcctgcgcaacgagagcacgggctccctgggcacgcagggccgcctctgcaacaagacctcggagggcatggatggctgtgagctcatgtgctgcgggcgtggctacaaccagttcaagagcgtgcaggtggagcgctgccactgcaagttccactggtgctgcttcgtcaggtgtaagaagtgcacggagatcgtggaccagtacatctgtaaatagcccggagggcctgctcccggccccccctgcactctgcctcacaaaggtctatattatataaatctatataaatctattttatatttgtataagtaaatgggtgggtgctatacaatggaaagatgaaaatggaaaggaagagcttatttaagagacgctggagatctctgaggagtggactttgctggttctctcctcttggtgggtgggagacagggctttttctctccctctggcgaggactctcaggatgtagggacttggaaatatttactgtctgtccaccacggcctggaggagggaggttgtggttggatggaggagatgatcttgtctggaagtctagagtctttgttggttagaggactgcctgtgatcctggccactaggccaagaggccctatgaaggtggcgggaactcagcttcaacctcgatgtcttcagggtcttgtccagaatgtagatgggttccgtaagaggcctggtgctctcttactctttcatccacgtgcacttgtgcggcatctgcagtttacaggaacggctccttccctaaaatgagaagtccaaggtcatctctggcccagtgaccacagagagatctgcacctcccggacttcaggcctgcctttccagcgagaattcttcatcctccacggttcactagctcctacctgaagaggaaagggggccatttgacctgacatgtcaggaaagccctaaactgaatgtttgcgcctgggctgcagaagccagggtgcatgaccaggctgcgtggacgttatactgtcttcccccacccccggggaggggaagcttgagctgctgctgtcactcctccaccgagggaggcctcacaaaccacaggacgctgcaacgggtcaggctggcgggcccggcgtgctcatcatctctgccccaggtgtacggtttctctctgacattaaatgcccttcatggaaaaaaaaaaaagaaaaaaaaaaaaaaaa

SEQ ID NO: 88 - protein, 359 aa, Homo sapiens
MPSLLLLFTAALLSSWAQLLTDANSWWSLALNPVQRPEMFIIGAQPVCSQLPGLSPGQRKLCQLYQEHMAYIGEGAKTGIKECQHQFRQRRWNCSTADNASVFGRVMQIGSRETAFTHAVSAAGVVNAISRACREGELSTCGCSRTARPKDLPRDWLWGGCGDNVEYGYRFAKEFVDAREREKNFAKGSEEQGRVLMNLQNNEAGRRAVYKMADVACKCHGVSGSCSLKTCWLQLAEFRKVGDRLKEKYDSAAAMRVTRKGRLELVNSRFTQPTPEDLVYVDPSPDYCLRNESTGSLGTQGRLCNKTSEGMDGCELMCCGRGYNQFKSVQVERCHCKFHWCCFVRCKKCTEIVDQYICK

SEQ ID NO: 89 - DNA, 791 bp, Homo sapiens
ggcagccgtctgtgccacccagagccggcgggccgctaggtccccggagaccctgctatggtgcgtgcgggcgccgtgggggctcatctccccgcgtccggcttggatatcttcggggacctgaagaagatgaacaagcgccagctctattaccaggttttaaacttcgccatgatcgtgtcttctgcactcatgatatggaaaggcttgatcgtgctcacaggcagtgagagccccatcgtggtggtgctgagtggcagtatggagccggcctttcacagaggagacctcctgttcctcacaaatttccgggaagacccaatcagagctggtgaaatagttgtttttaaagttgaaggacgagacattccaatagttcacagagtaatcaaagatgaaaaagataatggagacatcaaatttctgactaaaggagataataatgaagttgatgatagaggcttgtacaaagaaggccagaactggctggaaaagaaggacgtggtgggaagagcaagagggtttttaccatatgttggtatggtcaccataataatgaatgactatccaaaattcaagtatgctcttttggctgtaatgggtgcatatgtgttactaaaacgtgaatcctaaaatgagaagcagttcctgggaccagattgaaatgaattctgttgaaaaagagaaaaactaatatatttgagatgttccattttctgtataaaagggaacagtgtggagatgtttttgtcttgtccaaataaaagattcaccagtaaaaaaaaaaaaaa

SEQ ID NO: 90 - protein, 192 aa, Homo sapiens
MVRAGAVGAHLPASGLDIFGDLKKMNKRQLYYQVLNFAMIVSSALMIWKGLIVLTGSESPIVVVLSGSMEPAFHRGDLLFLTNFREDPIRAGEIVVFKVEGRDIPIVHRVIKVHEKDNGDIKFLTKGDNNEVDDRGLYKEGQNWLEKKDVVGRARGFLPYVGMVTIIMNDYPKFKYALLAVMGAYVLLKRES

SEQ ID NO: 91 - DNA, 2108 bp, Homo sapiens
gattactcacacagtcttgaagatgcaatgtcagctatttaggacagaaacatccaaggccgtgtcagaactcaattacgactacatatgcattaaggcaggaactggcaggcctcagggtacgccaactataggactcgtgcttctcgtacgctgggctataatctatgaaactgagctccagagccagccaatcacttagctcctcataacaagtctaactggctctggaaagctgaaagggctgcactggaacaacacagatgagatattctacacattaatctacttatctggaatcactttgcctctaaaggccagagaaaaatcacagcttccttgtcggaggggaaaaggacaggtgatctggggaaaacgcagctacacctggagcaaggtctcttcccggcttggcaatctcagctgtgccggcgctacgggacccgagccgtcccagaaaccaaagggcaggcacggcagcaaacgcctgagtgctgctgccttcggtgactatatgagaatggaaacttctaaggaagccaggttgttagaattgttaccccctttactcagagataacatagattatccaggctgagatggaaaacaagccctttattgaattttcaacacagactccctgcttctcatctccttaataaaatttcattaaaatccccttgaactcccatgttcaaatctccatttgttgacagacaaagccaacaatactctaaactgaggcctgcaagtcatttcatttgtatttttgtccagaaatttcccataggaagacttcacctcctacaactccgaagaaaacccttactgtccaagaccgtcaccagcaaccatccgcagtcattcaagtggaagctttcacagcttttgtacattctctgtgtcaatatacaactgagttacagactgtcccctggctccctgacccttacaaacactaaaagttttgtttgactcaacttcaagctgctcatctgttagtaagtgatgttcactccagaacacattcatgatgagaactttctaaaagaccagcactgctcttcccctcctataatcataataatcatgataacctgaaacatgttactgggactcgacatttttctggggattgaaatctttagtccttggagctgtcacatagcaggggcaacctcacactgaaacaaaggaagtgatgtcccattattatccaccctgagccaccataatatgctgtttacatttattttcttcagcctgtgcaaaacaaagcaatggaaaaggaaactaaaaaatatacatactagtaccattatcttcttttgcctaaaattactaatgcaccacgtcagtctgcttccttcaggcatcattctcaattcatcaggacttgtattagcaggttctggctagagagactatctcctgtcatcacgatcaattaatgttttctggtgatcacatcaggccctatctaagaagctcatggtatacaagggtcacccaaatagctgagtgcagtccttgctcatatttccttcatcttaaccccgcaaacaagaattaagatgatcccaataaaagaaaaattgctcaggaaactgaacctttttctgaaccaagcactgtcagcaaatctcaggtattagagcaactatggttgattgaaaagtgtctcaaaatctgggccaagaatgattgctaggtccataagctaatttgtctggccttgccatttacgtaagccaaagaaagtcactcatgagtaaactatagaaaacgttcagacccatcctgttagtatgtcaaatcaactaagactggcagggtattaactccattccaggtgacatggataaagagccccattattttcacagtgccagcctctacctaaggaaaccctagaccttggaaccagtttcctggtagggaactgctgacagtttcaatgctgacagttggagccaatgcctcatagtgtaaactgaaagaaaaatagttgctttttaaaatgtcagcaagaaggcctgcctcatcttaacaaagcaaaaaaaaatgctttaattcaaattaaaaatcatgatactaaaaaaaaaaaa

SEQ ID NO: 92 - protein, 59 aa, Homo sapiens
MQCQLFRTETSKAVSELNYDYICIKAGTGRPQGTPTIGLVLLVRWAIIYETELQSQPIT

SEQ ID NO: 93 - DNA, 1991 bp, Homo sapiens
cgcggcggctggcgtcgggaaagtacagtaaaaagtccgagtgcagccgccgggcgcaggatgggatccggctcctccagctaccggcccaaggccatctacctggacatcgatggacgcattcagaaggtaatcttcagcaagtactgcaactccagcgacatcatggacctgttctgcatcgccaccggcctgcctcggaacacgaccatctccctgctgaccaccgacgacgccatggtctccatcgaccccaccatgcccgcgaattcagaacgcactccgtacaaagtgagacctgtggccatcaagcaactctccgctggtgtcgaggacaagagaaccacaagccgtggccagtctgctgagagaccactgagggacagacgggttgtgggcctggagcagccccggagggaaggagcatttgaaagtggacaggtagagcccaggcccagagagccccagggctgctaccaggaaggccagcgcatccctccagagagagaagaattaatccagagcgtgctggcgcaggttgcagagcagttctcaagagcattcaaaatcaatgaactgaaagctgaagttgcaaatcacttggctgtcctagagaaacgcgtggaattggaaggactaaaagtggtggagattgagaaatgcaagagtgacattaagaagatgagggaggagctggcggccagaagcagcaggaccaactgcccctgtaagtacagttttttggataaccacaagaagttgactcctcgacgcgatgttcccacttaccccaagtacctgctctctccagagaccatcgaggccctgcggaagccgacctttgacgtctggctttgggagcccaatgagatgctgagctgcctggagcacatgtaccacgacctcgggctggtcagggacttcagcatcaaccctgtcaccctcaggaggtggctgttctgtgtccacgacaactacagaaacaaccccttccacaacttccggcactgcttctgcgtggcccagatgatgtacagcatggtctggctctgcagtctccaggagaagttctcacaaacggatatcctgatcctaatgacagcggccatctgccacgatctggaccatcccggctacaacaacacgtaccagatcaatgcccgcacagagctggcggtccgctacaatgacatctcaccgctggagaaccaccactgcgccgtggccttccagatcctcgccgagcctgagtgcaacatcttctccaacatcccacctgatgggttcaagcagatccgacagggaatgatcacattaatcttggccactgacatggcaagacatgcagaaattatggattctttcaaagagaaaatggagaattttgactacagcaacgaggagcacatgaccctgctgaagatgattttgataaaatgctgtgatatctctaacgaggtccgtccaatggaagtcgcagagccttgggtggactgtttattagaggaatattttatgcagagcgaccgtgagaagtcagaaggccttcctgtggcaccgttcatggaccgagacaaagtgaccaaggccacagcccagattgggttcatcaagtttgtcctgatcccaatgtttgaaacagtgaccaagctcttccccatggttgaggagatcatgctgcagccactttgggaatcccgagatcgctacgaggagctgaagcggatagatgacgccatgaaagagttacagaagaagactgacagcttgacgtctggggccaccgagaagtccagagagagaagcagagatgtgaaaaacagtgaaggagactgtgcctgaggaaagcggggggcgtggctgcagttctggacgggctggccgagctgcgcgggatccttgtgcagggaagagctgccctgggcacctggcaccacaagaccatgttttctaagaaccattttgttcactgatacaaaaaaaaaaaaaaa

SEQ ID NO: 94 - protein, 593 aa, Homo sapiens
MGSGSSSYRPKAIYLDIDGRIQKVIFSKYCNSSDIMDLFCIATGLPRNTTISLLTTDDAMVSIDPTMPANSERTPYKVRPVAIKQLSAGVEDKRTTSRGQSAERPLRDRRVVGLEQPRREGAFESGQVEPRPREPQGCYQEGQRIPPEREELIQSVLAQVAEQFSRAFKINELKAEVANHLAVLEKRVELEGLKVVEIEKCKSDIKKMREELAARSSRTNCPCKYSFLDNHKKLTPRRDVPTYPKYLLSPETIEALRKPTFDVWLWEPNEMLSCLEHMYHDLGLVRDFSINPVTLRRWLFCVHDNYRNNPFHNFRHCFCVAQMMYSMVWLCSLQEKFSQTDILILMTAAICHDLDHPGYNNTYQINARTELAVRYNDISPLENHHCAVAFQILAEPECNIFSNIPPDGFKQIRQGMITLILATDMARHAEIMDSFKEKMENFDYSNEEHMTLLKMILIKCCDISNEVRPMEVAEPWVDCLLEEYFMQSDREKSEGLPVAPFMDRDKVTKATAQIGFIKFVLIPMFETVTKLFPMVEEIMLQPLWESRDRYEELKRIDDAMKELQKKTDSLTSGATEKSRERSRDVKNSEGDCA

SEQ ID NO: 95 - DNA, 691 bp, Homo sapiens
cagtcacaggcgagagccytgggatgcaccggccagaggcatgctgctgctgctcacgcttgccctcctggggggccccacctgggcagggaagatgtatggccctggaggaggcaagtatttcagcaccactgaagactacgaccatgaaatcacagggctgcgggtgtctgtaggtcttctcctggtgaaaagtgtccaggtgaaacttggagactcctgggacgtgaaactgggagccttaggtgggaatacccaggaagtcaccctgcagccaggcgaatacatcacaaaagtctttgtcgccttccaagctttcctccggggtatggtcatgtacaccagcaaggaccgctatttctattttgggaagcttgatggccagatctcctctgcctaccccagccaagaggggcaggtgctggtgggcatctatggccagtatcaactccttggcatcaagagcattggctttgaatggaattatccactagaggagccgaccactgagccaccagttaatctcacatactcagcaaactcacccgtgggtcgctagggtggggtatggggccatccgagctgaggccatctgtgtggtggtggctgatggtactggagtaactgagtcgggacgctgaatctgaatccaccaataaataaagcttctgcagaatcagtgaaaaaaaaa

SEQ ID NO: 96 - protein, 172 aa, Homo sapiens
MLLLLTLALLGGPTWAGKMYGPGGGKYFSTTEDYDHEITGLRVSVGLLLVKSVQVKLGDSWDVKLGALGGNTQEVTLQPGEYITKVFVAFQAFLRGMVMYTSKDRYFYFGKLDGQISSAYPSQEGQVLVGIYGQYQLLGIKSIGFEWNYPLEEPTTEPPVNLTYSANSPVGR

SEQ ID NO: 97 - DNA, 1059 bp, Homo sapiens
ccgttccgcgctctggcggctcctcccgggcgatgcctccgctctgggccctgctggccctcggctgcctgcggttcggctcggctgtgaacctgcagccccaactggccagtgtgactttcgccaccaacaaccccacacttaccactgtggccttggaaaagcctctctgcatgtttgacagcaaagaggccctcactggcacccacgaggtctacctgtatgtcctggtcgactcagccatttccaggaatgcctcagtgcaagacagcaccaacaccccactgggctcaacgttcctacaaacagagggtgggaggacaggtccctacaaagctgtggcctttgacctgatcccctgcagtgacctgcccagcctggatgccattggggatgtgtccaaggcctcacagatcctgaatgcctacctggtcagggtgggtgccaacgggacctgcctgtgggatcccaacttccagggcctctgtaacgcacccctgtcggcagccacggagtacaggttcaagtatgtcctggtcaatatgtccacgggcttggtagaggaccagaccctgtggtcggaccccatccgcaccaaccagctcaccccatactcgacgatcgacacgtggccaggccggcggagcggaggcatgatcgtcatcacttccatcctgggctccctgcccttctttctacttgtgggttttgctggcgccattgccctcagcctcgtggacatggggagttctgatggggaaacgactcacgactcccaaatcactcaggaggctgttcccaagtcgctgggggcctcggagtcttcctacacgtccgtgaaccgggggccgccactggacagggctgaggtgtattccagcaagctccaagactgagcccagcaccacccctgggcagcagcatcctcctctctggccttgccccaggccctgcagcggtggttgtcacaccctgacttcagggaaggtgaaacagggcttgtccctccaactgcaggaaaacccttaataaaatcttctgatgagttctaaaaaaaaa

SEQ ID NO: 98 - protein, 287 aa, Homo sapiens
MPPLWALLALGCLRFGSAVNLQPQLASVTFATNNPTLTTVALEKPLCMFDSKEALTGTHEVYLYVLVDSAISRNASVQDSTNTPLGSTFLQTEGGRTGPYKAVAFDLIPCSDLPSLDAIGDVSKASQILNAYLVRVGANGTCLWDPNFQGLCNAPLSAATEYRFKYVLVNMSTGLVEDQTLWSDPIRTNQLTPYSTIDTWPGRRSGGMIVITSILGSLPFFLLVGFAGAIALSLVDMGSSDGETTHDSQITQEAVPKSLGASESSYTSVNRGPPLDRAEVYSSKLQD

SEQ ID NO: 99 - DNA, 1894 bp, Homo sapiens
gtctgacttcctcccagcacattcctgcactctgccgtgtccacactgccccacagacccagtcctccaagcctgctgccagctccctgcaagcccctcaggttgggccttgccacggtgccagcaggcagccctgggctgggggtaggggactccctacaggcacgcagccctgagacctcagagggccaccccttgagggtggccaggcccccagtggccaacctgagtgctgcctctgccaccagccctgctggcccctggttccgctggccccccagatgcctggctgagacacgccagtggcctcagctgcccacacctcttcccggcccctgaagttggcactgcagcagacagctccctgggcaccaggcagctaacagacacagccgccagcccaaacagcagcggcatgggcagcgccagcccgggtctgagcagcgtatcccccagccacctcctgctgccccccgacacggtgtcgcggacaggcttggagaaggcggcagcgggggcagtgggtctcgagagacgggactggagtcccagtccacccgccacgcccgagcagggcctgtccgccttctacctctcctactttgacatgctgtaccctgaggacagcagctgggcagccaaggcccctggggccagcagtcgggaggagccacctgaggagcctgagcagtgcccggtcattgacagccaagccccagcgggcagcctggacttggtgcccggcgggctgaccttggaggagcactcgctggagcaggtgcagtccatggtggtgggcgaagtgctcaaggacatcgagacggcctgcaagctgctcaacatcaccgcagatcccatggactggagccccagcaatgtgcagaagtggctcctgtggacagagcaccaataccggctgccccccatgggcaaggccttccaggagctggcgggcaaggagctgtgcgccatgtcggaggagcagttccgccagcgctcgcccctgggtggggatgtgctgcacgcccacctggacatctggaagtcagcggcctggatgaaagagcggacttcacctggggcgattcactactgtgcctcgaccagtgaggagagctggaccgacagcgaggtggactcatcatgctccgggcagcccatccacctgtggcagttcctcaaggagttgctactcaagccccacagctatggccgcttcattaggtggctcaacaaggagaagggcatcttcaaaattgaggactcagcccaggtggcccggctgtggggcatccgcaagaaccgtcccgccatgaactacgacaagctgagccgctccatccgccagtattacaagaagggcatcatccggaagccagacatctcccagcgcctcgtctaccagttcgtgcaccccatctgagtgcctggcccagggcctgaaacccgccctcaggggcctctctcctgcctgccctgcctcagccaggccctgagatgggggaaaacgggcagtctgctctgctgctctgaccttccagagcccaaggtcagggaggggcaaccaactgccccagggggatatgggtcctctggggccttcgggaccatggggcaggggtgcttcctcctcaggcccagctgctcccctggaggacagagggagacagggctgctccccaacacctgcctctgaccccagcatttccagagcagagcctacagaagggcagtgactcgacaaaggccacaggcagtccaggcctctctctgctccatccccctgcctcccattctgcaccacacctggcatggtgcagggagacatctgcacccctgagttgggcagccaggagtgcccccgggaatggataataaagatactagagaactg

SEQ ID NO: 100 - protein, 335 aa, Homo sapiens
MGSASPGLSSVSPSHLLLPPDTVSRTGLEKAAAGAVGLERRDWSPSPPATPEQGLSAFYLSYFDMLYPEDSSWAAKAPGASSREEPPEEPEQCPVIDSQAPAGSLDLVPGGLTLEEHSLEQVQSMVVGEVLKDIETACKLLNITADPMDWSPSNVQKWLLWTEHQYRLPPMGKAFQELAGKELCAMSEEQFRQRSPLGGDVLHAHLDIWKSAAWMKERTSPGAIHYCASTSEESWTDSEVDSSCSGQPIHLWQFLKELLLKPHSYGRFIRWLNKEKGIFKIEDSAQVARLWGIRKNRPAMNYDKLSRSIRQYYKKGIIRKPDISQRLVYQFVHPI

SEQ ID NO: 101 - DNA, 2664 bp, Homo sapiens
gagagaacagcgtgagcctgtgtgcttgtgtgctgagccctcatcccctcctggggccaggcttgggtttcacctgcagaatcgcttgtgctgggctgcctgggctgtcctcagtggcacctgcatgaagccgttctggctgccagagctggacagccccaggaaaacccacctctctgcagagcttgcccagctgtccccgggaagccaaatgcctctcatgtaagtcttctgctcgacggggtgtctcctaaaccctcactcttcagcctctgtttgaccatgaaatgaagtgactgagctctattctgtacctgccactctatttctggggtgacttttgtcagctgcccagaatctccaagccaggctggttctctgcatcctttcaatgacctgttttcttctgtaaccacaggttcggtggtgagaggaagcctcgcagaatccagcagaatcctcacagaatccagcagcagctctgctggggacatggtccatggtgcaacccacagcaaagccctgacctgacctcctgatgctcaggagaagccatgggcccctcctgtcctgtgttcctgtccttcacaaagctcagcctgtggtggctccttctgaccccagcaggtggagaggaagctaagcgcccacctcccagggctcctggagacccactctcctctcccagtcccacggcattgccgcagggaggctcgcataccgagactgaggaccggctcttcaaacacctcttccggggctacaaccgctgggcgcgcccggtgcccaacacttcagacgtggtgattgtgcgctttggactgtccatcgctcagctcatcgatgtggatgagaagaaccaaatgatgaccaccaacgtctggctaaaacaggagtggagcgactacaaactgcgctggaaccccgctgattttggcaacatcacatctctcagggtcccttctgagatgatctggatccccgacattgttctctacaacaatgcagatggggagtttgcagtgacccacatgaccaaggcccacctcttctccacgggcactgtgcactgggtgcccccggccatctacaagagctcctgcagcatcgacgtcaccttcttccccttcgaccagcagaactgcaagatgaagtttggctcctggacttatgacaaggccaagatcgacctggagcagatggagcagactgtggacctgaaggactactgggagagcggcgagtgggccatcgtcaatgccacgggcacctacaacagcaagaagtacgactgctgcgccgagatctaccccgacgtcacctacgccttcgtcatccggcggctgccgctcttctacaccatcaacctcatcatcccctgcctgctcatctcctgcctcactgtgctggtcttctacctgccctccgactgcggcgagaagatcacgctgtgcatttcggtgctgctgtcactcaccgtcttcctgctgctcatcactgagatcatcccgtccacctcgctggtcatcccgctcatcggcgagtacctgctgttcaccatgatcttcgtcaccctgtccatcgtcatcaccgtcttcgtgctcaatgtgcaccaccgctcccccagcacccacaccatgccccactgggtgcggggggcccttctgggctgtgtgccccggtggcttctgatgaaccggcccccaccacccgtggagctctgccaccccctacgcctgaagctcagcccctcttatcactggctggagagcaacgtggatgccgaggagagggaggtggtggtggaggaggaggacagatgggcatgtgcaggtcatgtggccccctctgtgggcaccctctgcagccacggccacctgcactctggggcctcaggtcccaaggctgaggctctgctgcaggagggtgagctgctgctatcaccccacatgcagaaggcactggaaggtgtgcactacattgccgaccacctgcggtctgaggatgctgactcttcggtgaaggaggactggaagtatgttgccatggtcatcgacaggatcttcctctggctgtttatcatcgtctgcttcctggggaccatcggcctctttctgcctccgttcctagctggaatgatctgactgcacctccctcgagctggctcccagggcaaaggggagggttcttggatgtggaagggctttgaacaatgtttagatttggagatgagcccaaagtgccagggagaacagccaggtgaggtgggaggttggagagccaggtgaggtctctctaagtcaggctggggttgaagtttggagtctgtccgagtttgcagggtgctgagctgtatggtccagcaggggagtaataagggctcttccggaaggggaggaagcgggaggcaggcctgcacctgatgtggaggtacaggcagatcttccctaccggggagggatggatggttggatacaggtggctgggctattccatccatctggaagcacatttgagcctccaggcttctccttgacgtcattcctctccttccttgctgcaaaatggctctgcaccagccggcccccaggaggtctggcagagctgagagccatggcctgcaggggctccatatgtccctacgcgtgcagcaggcaaacaaga

SEQ ID NO: 102 - protein, 529 aa, Homo sapiens
MGPSCPVFLSFTKLSLWWLLLTPAGGEEAKRPPPRAPGDPLSSPSPTALPQGGSHTETEDRLFKHLFRGYNRWARPVPNTSDVVIVRFGLSIAQLIDVDEKNQMMTTNVWLKQEWSDYKLRWNPADFGNITSLRVPSEMIWIPDIVLYNNADGEFAVTHMTKAHLFSTGTVHWVPPAIYKSSCSIDVTFFPFDQQNCKMKFGSWTYDKAKIDLEQMEQTVDLKDYWESGEWAIVNATGTYNSKKYDCCAEIYPDVTYAFVIRRLPLFYTINLIIPCLLISCLTVLVFYLPSDCGEKITLCISVLLSLTVFLLLITEIIPSTSLVIPLIGEYLLFTMIFVTLSIVITVFVLNVHHRSPSTHTMPHWVRGALLGCVPRWLLMNRPPPPVELCHPLRLKLSPSYHWLESNVDAEEREVVVEEEDRWACAGHVAPSVGTLCSHGHLHSGASGPKAEALLQEGELLLSPHMQKALEGVHYIADHLRSEDADSSVKEDWKYVAMVIDRIFLWLFIIVCFLGTIGLFLPPFLAGMI

SEQ ID NO: 103 - DNA, 1181 bp, Homo sapiens
cacgaggctggaaggggccacttcacacctcgggctcggcataaagcggccgccggccgccggcccccagacgcgccgccgctgccatggcccagcccctgtgcccgccgctctccgagtcctggatgctctctgcggcctggggcccaactcggcggccgccgccctccgacaaggactgcggccgctccctcgtctcgtccccagactcatggggcagcaccccagccgacagccccgtggcgagccccgcgcggccaggcaccctccgggacccccgcgccccctccgtaggtaggcgcggcgcgcgcagcagccgcctgggcagcgggcagaggcagagcgccagtgagcgggagaaactgcgcatgcgcacgctggcccgcgccctgcacgagctgcgccgctttctaccgccgtccgtggcgcccgcgggccagagcctgaccaagatcgagacgctgcgcctggctatccgctatatcggccacctgtcggccgtgctaggcctcagcgaggagagtctccagcgccggtgccggcagcgcggtgacgcggggtcccctcggggctgcccgctgtgccccgacgactgccccgcgcagatgcagacacggacgcaggctgaggggcaggggcaggggcgcgggctgggcctggtatccgccgtccgcgccggggcgtcctggggatccccgcctgcctgccccggagcccgagctgcacccgagccgcgcgacccgcctgcgctgttcgccgaggcggcgtgcccggaagggcaggcgatggagccaagcccaccgtccccgctccttccgggcgacgtgctggctctgttggagacctggatgcccctctcgcctctggagtggctgcctgaggagcccaagtgacaagggacaactgacgccgtctctgtgagcaccgaggctttttggcctcagcaccttcgaagtggttccttggcagactgcctttcctggaagagggcacgggcgatcccgacgggggcattcctgcgggtgagagccgtccccaccgcggcggcccttctcagcccctccctccatggagggacccatagggctagacactttgaggcaagcaggaggctctgcctaatgtgaatttatttatttgtgaataaactgtactggtgtcaaaaaaaaaaaaaaaaaaaa

SEQ ID NO: 104 - protein, 268 aa, Homo sapiens
MAQPLCPPLSESWMLSAAWGPTRRPPPSDKDCGRSLVSSPDSWGSTPADSPVASPARPGTLRDPRAPSVGRRGARSSRLGSGQRQSASEREKLRMRTLARALHELRRFLPPSVAPAGQSLTKIETLRLAIRYIGHLSAVLGLSEESLQRRCRQRGDAGSPRGCPLCPDDCPAQMQTRTQAEGQGQGRGLGLVSAVRAGASWGSPPACPGARAAPEPRDPPALFAEAACPEGQAMEPSPPSPLLPGDVLALLETWMPLSPLEWLPEEPK

SEQ ID NO: 105 - DNA, 3810 bp, Homo sapiens
ccacggagaagcccaccgatgcctacggagagctggacttcacgggggccggccgcaagcacagcaatttcctccggctctctgaccgaacggatccagctgcagtttatagtctggtcacacgcacatggggcttccgtgccccgaacctggtggtgtcagtgctggggggatcggggggccccgtcctccagacctggctgcaggacctgctgcgtcgtgggctggtgcgggctgcccagagcacaggagcctggattgtcactgggggtctgcacacgggcatcggccggcatgttggtgtggctgtacgggaccatcagatggccagcactgggggcaccaaggtggtggccatgggtgtggccccctggggtgtggtccggaatagagacaccctcatcaaccccaagggctcgttccctgcgaggtaccggtggcgcggtgacccggaggacggggtccagtttcccctggactacaactactcggccttcttcctggtggacgacggcacacacggctgcctggggggcgagaaccgcttccgcttgcgcctggagtcctacatctcacagcagaagacgggcgtgggagggactggaattgacatccctgtcctgctcctcctgattgatggtgatgagaagatgttgacgcgaatagagaacgccacccaggctcagctcccatgtctcctcgtggctggctcagggggagctgcggactgcctggcggagaccctggaagacactctggccccagggagtgggggagccaggcaaggcgaagcccgagatcgaatcaggcgtttctttcccaaaggggaccttgaggtcctgcaggcccaggtggagaggattatgacccggaaggagctcctgacagtctattcttctgaggatgggtctgaggaattcgagaccatagttttgaaggcccttgtgaaggcctgtgggagctcggaggcctcagcctacctggatgagctgcgtttggctgtggcttggaaccgcgtggacattgcccagagtgaactctttcggggggacatccaatggcggtccttccatctcgaagcttccctcatggacgccctgctgaatgaccggcctgagttcgtgcgcttgctcatttcccacggcctcagcctgggccacttcctgaccccgatgcgcctggcccaactctacagcgcggcgccctccaactcgctcatccgcaaccttttggaccaggcgtcccacagcgcaggcaccaaagccccagccctaaaagggggagctgcggagctccggccccctgacgtggggcatgtgctgaggatgctgctggggaagatgtgcgcgccgaggtacccctccgggggcgcctgggaccctcacccaggccagggcttcggggagagcatgtatctgctctcggacaaggccacctcgccgctctcgctggatgctggcctcgggcaggccccctggagcgacctgcttctttgggcactgttgctgaacagggcacagatggccatgtacttctgggagatgggttccaatgcagtttcctcagctcttggggcctgtttgctgctccgggtgatggcacgcctggagcctgacgctgaggaggcagcacggaggaaagacctggcgttcaagtttgaggggatgggcgttgacctctttggcgagtgctatcgcagcagtgaggtgagggctgcccgcctcctcctccgtcgctgcccgctctggggggatgccacttgcctccagctggccatgcaagctgacgcccgtgccttctttgcccaggatggggtacagtctctgctgacacagaagtggtggggagatatggccagcactacacccatctgggccctggttctcgccttcttttgccctccactcatctacacccgcctcatcaccttcaggaaatcagaagaggagcccacacgggaggagctagagtttgacatggatagtgtcattaatggggaagggcctgtcgggacggcggacccagccgagaagacgccgctgggggtcccgcgccagtcgggccgtccgggttgctgcgggggccgctgcggggggcgccggtgcctacgccgctggttccacttctggggcgcgccggtgaccatcttcatgggcaacgtggtcagctacctgctgttcttgctgcttttctcgcgggtgctgctcgtggatttccagccggcgccgcccggctccctggagctgctgctctatttctgggctttcacgctgctgtgcgaggaactgcgccagggcctgagcggaggcgggggcagcctcgccagcgggggccccgggcctggccatgcctcactgagccagcgcctgcgcctctacctcgccgacagctggaaccagtgcgacctagtggctctcacctgcttcctcctgggcgtgggctgccggctgaccccgggtttgtaccacctgggccgcactgtcctctgcatcgacttcatggttttcacggtgcggctgcttcacatcttcacggtcaacaaacagctggggcccaagatcgtcatcgtgagcaagatgatgaaggacgtgttcttcttcctcttcttcctcggcgtgtggctggtagcctatggcgtggccacggaggggctcctgaggccacgggacagtgacttcccaagtatcctgcgccgcgtcttctaccgtccctacctgcagatcttcgggcagattccccaggaggacatggacgtggccctcatggagcacagcaactgctcgtcggagcccggcttctgggcacaccctcctggggcccaggcgggcacctgcgtctcccagtatgccaactggctggtggtgctgctcctcgtcatcttcctgctcgtggccaacatcctgctggtcaacttgctcattgccatgttcagttacacattcggcaaagtacagggcaacagcgatctctactggaaggcgcagcgttaccgcctcatccgggaattccactctcggcccgcgctggccccgccctttatcgtcatctcccacttgcgcctcctgctcaggcaattgtgcaggcgaccccggagcccccagccgtcctccccggccctcgagcatttccgggtttacctttctaaggaagccgagcggaagctgctaacgtgggaatcggtgcataaggagaactttctgctggcacgcgctagggacaagcgggagagcgactccgagcgtctggagcgcacgtcccagaaggtggacttggcactgaaacagctgggacacatccgcgagtacgaacagcgcctgaaagtgctggagcgggaggtccagcagtgtagccgcgtcctggggtgggtgacgtaggccgttagcagctctgccatgttgccctcaggtgggccgccaccccttgacctgcatgggtccaaagagtgagccatgctggcggattttaaggagaagcccccacaggggattttgctcttagagtaaggctcatgtgggcctcggcccccgcacctggtggccttgtccttgaggtgagccccatgtccatctgggccactgtcaggaccacctttgggagtgtcatccttacaaaccacagcatgcccggctcctcccagaaccagtcccagcctgggaggatcaaggcctggatcccgggccgttatccatctggaggctgcagggtccttggggtaacagggaccacagacccctcaccactcacagattcctcacactggggaaataaagccatttcagaggaaaaaaaaaaaaaaaaaaaaaaaaaaaa

SEQ ID NO: 106 - protein, 1016 aa, Homo sapiens
MASTGGTKVVAMGVAPWGVVRNRDTLINPKGSFPARYRWRGDPEDGVQFPLDYNYSAFFLVDDGTHGCLGGENRFRLRLESYISQQKTGVGGTGIDIPVLLLLIDGDEKMLTRIENATQAQLPCLLVAGSGGAADCLAETLEDTLAPGSGGARQGEARDRIRRFFPKGDLEVLQAQVERIMTRKELLTVYSSEDGSEEFETIVLKALVKACGSSEASAYLDELRLAVAWNRVDIAQSELFRGDIQWRSFHLEASLMDALLNDRPEFVRLLISHGLSLGHFLTPMRLAQLYSAAPSNSLIRNLLDQASHSAGTKAPALKGGAAELRPPDVGHVLRMLLGKMCAPRYPSGGAWDPHPGQGFGESMYLLSDKATSPLSLDAGLGQAPWSDLLLWALLLNRAQMAMYFWEMGSNAVSSALGACLLLRVMARLEPDAEEAARRKDLAFKFEGMGVDLFGECYRSSEVRAARLLLRRCPLWGDATCLQLAMQADARAFFAQDGVQSLLTQKWWGDMASTTPIWALVLAFFCPPLIYTRLITFRKSEEEPTREELEFDMDSVINGEGPVGTADPAEKTPLGVPRQSGRPGCCGGRCGGRRCLRRWFHFWGAPVTIFMGNVVSYLLFLLLFSRVLLVDFQPAPPGSLELLLYFWAFTLLCEELRQGLSGGGGSLASGGPGPGHASLSQRLRLYLADSWNQCDLVALTCFLLGVGCRLTPGLYHLGRTVLCIDFMVFTVRLLHIFTVNKQLGPKIVIVSKMMKDVFFFLFFLGVWLVAYGVATEGLLRPRDSDFPSILRRVFYRPYLQIFGQIPQEDMDVALMEHSNCSSEPGFWAHPPGAQAGTCVSQYANWLVVLLLVIFLLVANILLVNLLIAMFSYTFGKVQGNSDLYWKAQRYRLIREFHSRPALAPPFIVISHLRLLLRQLCRRPRSPQPSSPALEHFRVYLSKEAERKLLTWESVHKENFLLARARDKRESDSERLERTSQKVDLALKQLGHIREYEQRLKVLEREVQQCSRVLGWVT

SEQ ID NO: 107 - DNA, 1378 bp, Homo sapiens
ggtagcagcatccaccgggcgggaggtcggaggcagcaaggccttaaaggctactgagtgcgccggccgttccgtgtccagaacctcccctactcctccgccttctcttccttggccgcccaccgccaagttccgactccggttttcgcctttgcaaagcctaaggaggaggttaggaacagccgcgcccccctccctgcggccgccgccccctgcctctcggctctgctccctgccgcgtgcgcctgggccgtgcgccccggcaggcgccagccatgtcgatgctgccgtcgtttggctttacgcaggagcaagtggcgtgcgtgtgcgaggttctgcagcaaggcggaaacctggagcgcctgggcaggttcctgtggtcactgcccgcctgcgaccacctgcacaagaacgagagcgtactcaaggccaaggcggtggtcgccttccaccgcggcaacttccgtgagctctacaagatcctggagagccaccagttctcgcctcacaaccaccccaaactgcagcaactgtggctgaaggcgcattacgtggaggccgagaagctgcgcggccgacccctgggcgccgtgggcaaatatcgggtgcgccgaaaatttccactgccgcgcaccatctgggacggcgaggagaccagctactgcttcaaggagaagtcgaggggtgtcctgcgggagtggtacgcgcacaatccctacccatcgccgcgtgagaagcgggagctggccgaggccaccggcctcaccaccacccaggtcagcaactggtttaagaaccggaggcaaagagaccgggccgcggaggccaaggaaagggagaacaccgaaaacaataactcctcctccaacaagcagaaccaactctctcctctggaagggggcaagccgctcatgtccagctcagaagaggaattctcacctccccaaagtccagaccagaactcggtccttctgctgcagggcaatatgggccacgccaggagctcaaactattctctcccgggcttaacagcctcgcagcccagtcacggcctgcagacccaccagcatcagctccaagactctctgctcggccccctcacctccagtctggtggacttggggtcctaagtggggagggactggggcctcgaagggattcctggagcagcaaccactgcagcgactagggacacttgtaaatagaaatcaggaacatttttgcagcttgtttctggagttgtttgcgcataaaggaatggtggactttcacaaatatctttttaaaaatcaaaaccaacagcgatctcaagcttaatctcctcttctctccaactctttccacttttgcattttccttcccaatgcagagatcaggg

SEQ ID NO: 108 - protein, 284 aa, Homo sapiens
MSMLPSFGFTQEQVACVCEVLQQGGNLERLGRFLWSLPACDHLHKNESVLKAKAVVAFHRGNFRELYKILESHQFSPHNHPKLQQLWLKAHYVEAEKLRGRPLGAVGKYRVRRKFPLPRTIWDGEETSYCFKEKSRGVLREWYAHNPYPSPREKRELAEATGLTTTQVSNWFKNRRQRDRAAEAKERENTENNNSSSNKQNQLSPLEGGKPLMSSSEEEFSPPQSPDQNSVLLLQGNMGHARSSNYSLPGLTASQPSHGLQTHQHQLQDSLLGPLTSSLVDLGS

SEQ ID NO: 109 - DNA, 3885 bp, Homo sapiens
ggggctccgcgggcctggagcacggccgggtctaatatgcccggagccgaggcgcgatgaaggagaagtccaagaatgcggccaagaccaggagggagaaggaaaatggcgagttttacgagcttgccaagctgctcccgctgccgtcggccatcacttcgcagctggacaaagcgtccatcatccgcctcaccacgagctacctgaagatgcgcgccgtcttccccgaaggtttaggagacgcgtggggacagccgagccgcgccgggcccctggacggcgtcgccaaggagctgggatcgcacttgctgcagactttggatggatttgtttttgtggtagcatctgatggcaaaatcatgtatatatccgagaccgcttctgtccatttaggcttatcccaggtggagctcacgggcaacagtatttatgaatacatccatccttctgaccacgatgagatgaccgctgtcctcacggcccaccagccgctgcaccaccacctgctccaagagtatgagatagagaggtcgttctttcttcgaatgaaatgtgtcttggcgaaaaggaacgcgggcctgacctgcagcggatacaaggtcatccactgcagtggctacttgaagatcaggcagtatatgctggacatgtccctgtacgactcctgctaccagattgtggggctggtggccgtgggccagtcgctgccacccagtgccatcaccgagatcaagctgtacagtaacatgttcatgttcagggccagccttgacctgaagctgatattcctggattccagggtgaccgaggtgacgggttacgagccgcaggacctgatcgagaagaccctataccatcacgtgcacggctgcgacgtgttccacctccgctacgcacaccacctcctgttggtgaagggccaggtcaccaccaagtactaccggctgctgtccaagcggggcggctgggtgtgggtgcagagctacgccaccgtggtgcacaacagccgctcgtcccggccccactgcatcgtgagtgtcaattatgtactcacggagattgaatacaaggaacttcagctgtccctggagcaggtgtccactgccaagtcccaggactcctggaggaccgccttgtctacctcacaagaaactaggaaattagtgaaacccaaaaataccaagatgaagacaaagctgagaacaaacccttaccccccacagcaatacagctcgttccaaatggacaaactggaatgcggccagctcggaaactggagagccagtccccctgcaagcgctgctgctcctccagaactgcagccccactcagaaagcagtgaccttctgtacacgccatcctacagcctgcccttctcctaccattacggacacttccctctggactctcacgtcttcagcagcaaaaagccaatgttgccggccaagttcgggcagccccaaggatccccttgtgaggtggcacgctttttcctgagcacactgccagccagcggtgaatgccagtggcattatgccaaccccctagtgcctagcagctcgtctccagctaaaaatcctccagagccaccggcgaacactgctaggcacagcctggtgccaagctacgaagcgcccgccgccgccgtgcgcaggttcggcgaggacaccgcgcccccgagcttcccgagctgcggccactaccgcgaggagcccgcgctgggcccggccaaagccgcccgccaggccgcccgggacggggcgcggctggcgctggcccgcgcggcacccgagtgctgcgcgcccccgacccccgaggccccgggcgcgccggcgcagctgcccttcgtgctgctcaactaccaccgcgtgctggcccggcgcggaccgctggggggcgccgcacccgccgcctccggcctggcctgcgctcccggcggccccgaggcggcgaccggcgcgctgcggctccggcacccgagccccgccgccacctccccgcccggcgcgcccctgccgcactacctgggcgcctcggtcatcatcaccaacgggaggtgacccgctggccgcccgcgccaggagcctggacccggcctcccggggctgcggcgccaccgagcccggcaaatgcgcacgacctacattaatttatgcagagacagctgtttgaattggaccccgccgccgacttgcggatttccaccgcggaggccccgcgcgccggtgccgagggccgaggagcgcccgggtccgggcaggtgaccgcccgcctctgtcctgcgagggccggtgcgacccagttgctgggggcttggtttcctcaccttgaaatcgggcttcacgcgtcttgccttgtccccaacgttccacaacagtcccgctgggggattgaagcggtttcactccgcaaatatcctccactttcaggagggaaaacccaccctaccacagtccgctcttccaagtggacggcagacctgggaggggacgcctgtgtcacgagcccttttagatgcttaggtgaaggcagaagtgatgattgtaagtcccatgaatacacaactccactgtctttaaaagtcattcaagagtctcattatttttgtttttatttaaccctttcttcaatacaaaaagccaacaaaccaagactaagggggtgaccatgcaattccattttgtgtctgtgaacataggtgtgcttcccaaatacattaacaagctcttacttccccctaacccctatgaactcttgataacaccaagagtagcaccttcagaatatattgaataggcattaaatgcaaaaatatatatgtagccagacagtttatgagaatgaccctgtcaagcttcattattacgtggcaaaatccctctggcccacacagatctgtaattcactaggctcgtgtttgctacaaatagtgctaataaagttaaattgcacgtgcaatacggaacactgtcaatggactgcaccttgtgaaggaaaaacatgcttaagggggtgtaatgaaaatgatgtagacattttaagcattttctacacagcgagaaaacttcgtaagaacatgttacgtgtgcaacaggtaaacagaaatcctttcataaagcaccagcagtgtttaaaaaatgagcttccattaatttttactttttatgggttttgcttaaagatctcaacatggaaaaatcctgtcatggctctgaactgcacaatgcattgaaccgccgtccttcaattttcttcacactatcaacactgcagcattttgctgctttatcaaaatggtttattttaggaaactttttccacctttctgaatggaaagaggttttcacaaatgttttaaactcatcgttctaaaatcaagtgcacctacaccaactgctctcaaaatgtgaactgacttttttttttttttttttgccaaccctgtgtcacttagtgaggacctgacacaatccctacagggtgtctgtcagtgggcctcatggtaagagtcacaatttgcaaatttaggaccgtgggtcatgcagcgaaggggctggatggtaggaagggatgtgcccgcctctccacgcactcagctatacctcattcacagctccttgtgagtgtgtgcacaggaaataagccgagggtattatttttttatgttcatgagtcttgtaattaaaccgtgattcttgaaaggtgtaggtttgattactaggagataccaccgacatttttcaataaagtactgcaaaatgcttttgtgtctaccttgttattaacttttggggctgtatttagtaaaaataaatcaaggctatcggagcagttcaataacaaaggttactgttgagaaaaaagaccctatcatagatttacaag

SEQ ID NO: 110 - protein, 667 aa, Homo sapiens
MKEKSKNAAKTRREKENGEFYELAKLLPLPSAITSQLDKASIIRLTTSYLKMRAVFPEGLGDAWGQPSRAGPLDGVAKELGSHLLQTLDGFVFVVASDGKIMYISETASVHLGLSQVELTGNSIYEYIHPSDHDEMTAVLTAHQPLHHHLLQEYEIERSFFLRMKCVLAKRNAGLTCSGYKVIHCSGYLKIRQYMLDMSLYDSCYQIVGLVAVGQSLPPSAITEIKLYSNMFMFRASLDLKLIFLDSRVTEVTGYEPQDLIEKTLYHHVHGCDVFHLRYAHHLLLVKGQVTTKYYRLLSKRGGWVWVQSYATVVHNSRSSRPHCIVSVNYVLTEIEYKELQLSLEQVSTAKSQDSWRTALSTSQETRKLVKPKNTKMKTKLRTNPYPPQQYSSFQMDKLECGQLGNWRASPPASAAAPPELQPHSESSDLLYTPSYSLPFSYHYGHFPLDSHVFSSKKPMLPAKFGQPQGSPCEVARFFLSTLPASGECQWHYANPLVPSSSSPAKNPPEPPANTARHSLVPSYEAPAAAVRRFGEDTAPPSFPSCGHYREEPALGPAKAARQAARDGARLALARAAPECCAPPTPEAPGAPAQLPFVLLNYHRVLARRGPLGGAAPAASGLACAPGGPEAATGALRLRHPSPAATSPPGAPLPHYLGASVIITNGR

SEQ ID NO: 111 - DNA, 1804 bp, Homo sapiens
atgaacggacgctgcatctgcccgtccctgccctactcacccgtcagctccccgcagtcctcgcctcggctgccccggcggccgacagtggagtctcaccacgtctccatcacgggtatgcaggactgtgtgcagctgaatcagtataccctgaaggatgaaattggaaagggctcctatggtgtcgtcaagttggcctacaatgaaaatgacaatacctactatgcaatgaaggtgctgtccaaaaagaagctgatccggcaggccggctttccacgtcgccctccaccccgaggcacccggccagctcctggaggctgcatccagcccaggggccccattgagcaggtgtaccaggaaattgccatcctcaagaagctggaccaccccaatgtggtgaagctggtggaggtcctggatgaccccaatgaggaccatctgtacatggtgttcgaactggtcaaccaagggcccgtgatggaagtgcccaccctcaaaccactctctgaagaccaggcccgtttctacttccaggatctgatcaaaggcatcgagtacttacactaccagaagatcatccaccgtgacatcaaaccttccaacctcctggtcggagaagatgggcacatcaagatcgctgactttggtgtgagcaatgaattcaagggcagtgacgcgctcctctccaacaccgtgggcacgcccgccttcatggcacccgagtcgctctctgagacccgcaagatcttctctgggaaggccttggatgtttgggccatgggtgtgacactatactgctttgtctttggccagtgcccattcatggacgagcggatcatgtgtttacacagtaagatcaagagtcaggccctggaatttccagaccagcccgacatagctgaggacttgaaggacctgatcacccgtatgctggacaagaaccccgagtcgaggatcgtggtgccggaaatcaagctgcacccctgggtcacgaggcatggggcggagccgttgccgtcggaggatgagaactgcacgctggtcgaagtgactgaagaggaggtcgagaactcagtcaaacacattcccagcttggcaaccgtgatcctggtgaagaccatgatacgtaaacgctcctttgggaacccattcgagggcagccggcgggaggaacgctcactgtcagcgcctggaaacttgctcaccaaaaaaccaaccagggaatgtgagtccctgtctgagctcaagacctagaaaataagtccccttcctgcctgttgcaaagtaacgtaagagttccctcacccgagtggatgcagacgttcttgctgtcagccaccttccttcatacacatagccagcccagggtgaccagaacgtcccaggacagatgaggctttgtgtccttatgagagtgggagaacctggtgggcacccctggtgcaggtgctgtggtgggtggggaccccactgcctttcccactgagcacatcatggctacctgacttggtgggagttccattcagtcacttctgtttcttaaacatagctttactgaggtacaattcacataccatgtaattcacccacgggaagtgtatgattcagtggtttctaatacacacttctgcagccattaccaccgtcaactttacgacattttcatcagcccaagaagacaccctacactccttagctgtccccatccaactcccccaccccagtaaccactcagaataggtatggatttgcctattctggacgtttcgtataaatggcgtcatacactaaaaaaaaaaaaaaa

SEQ ID NO: 112 - protein, 417 aa, Homo sapiens
MNGRCICPSLPYSPVSSPQSSPRLPRRPTVESHHVSITGMQDCVQLNQYTLKDEIGKGSYGVVKLAYNENDNTYYAMKVLSKKKLIRQAGFPRRPPPRGTRPAPGGCIQPRGPIEQVYQEIAILKKLDHPNVVKLVEVLDDPNEDHLYMVFELVNQGPVMEVPTLKPLSEDQARFYFQDLIKGIEYLHYQKIIHRDIKPSNLLVGEDGHIKIADFGVSNEFKGSDALLSNTVGTPAFMAPESLSETRKIFSGKALDVWAMGVTLYCFVFGQCPFMDERIMCLHSKIKSQALEFPDQPDIAEDLKDLITRMLDKNPESRIVVPEIKLHPWVTRHGAEPLPSEDENCTLVEVTEEEVENSVKHIPSLATVILVKTMIRKRSFGNPFEGSRREERSLSAPGNLLTKKPTRECESLSELKT

SEQ ID NO: 113 - DNA, 429 bp, Homo sapiens
atgaaacctctgatatggacatggtcagatgttgaaggccagaggccggctctgctcatctgcacagctgcagcaggacccacgcagggagttaagggttatggcaagccctttgagccaagaagtgtgaaaaacatacactctactcctgcttacccagatgccacaatgcacagacaactcctggctccggtggaaggaaggatggcagagacattgaatcagaaactccatgttgccaatgtgctggaagatgaccccggctacctacctcacgtctacagcgaggaaggggagtgtggaggggccccatccctcagctctctggccagcttggaacaggagttgcaacctgatttgctggactctttgggttcaaaagcgactccgtttgaggaaatatattcagagtcaggtgttccttcctaa

SEQ ID NO: 114 - protein, 142 aa, Homo sapiens
MKPLIWTWSDVEGQRPALLICTAAAGPTQGVKGYGKPFEPRSVKNIHSTPAYPDATMHRQLLAPVEGRMAETLNQKLHVANVLEDDPGYLPHVYSEEGECGGAPSLSSLASLEQELQPDLLDSLGSKATPFEEIYSESGVPS

SEQ ID NO: 115 - DNA, 1270 bp, Homo sapiens
cgaatgcaggcgacttgcgagctgggagcgatttaaaacgctttggattcccccggcctgggtggggagagcgagctgggtgccccctagattccccgcccccgcacctcatgagccgaccctcggctccatggagcccggcaattatgccaccttggatggagccaaggatatcgaaggcttgctgggagcgggaggggggcggaatctggtcgcccactcccctctgaccagccacccagcggcgcctacgctgatgcctgctgtcaactatgcccccttggatctgccaggctcggcggagccgccaaagcaatgccacccatgccctggggtgccccaggggacgtccccagctcccgtgccttatggttactttggaggcgggtactactcctgccgagtgtcccggagctcgctgaaaccctgtgcccaggcagccaccctggccgcgtaccccgcggagactcccacggccggggaagagtaccccagtcgccccactgagtttgccttctatccgggatatccgggaacctaccacgctatggccagttacctggacgtgtctgtggtgcagactctgggtgctcctggagaaccgcgacatgactccctgttgcctgtggacagttaccagtcttgggctctcgctggtggctggaacagccagatgtgttgccagggagaacagaacccaccaggtcccttttggaaggcagcatttgcagactccagcgggcagcaccctcctgacgcctgcgcctttcgtcgcggccgcaagaaacgcattccgtacagcaaggggcagttgcgggagctggagcgggagtatgcggctaacaagttcatcaccaaggacaagaggcgcaagatctcggcagccaccagcctctcggagcgccagattaccatctggtttcagaaccgccgggtcaaagagaagaaggttctcgccaaggtgaagaacagcgctaccccttaagagatctccttgcctgggtgggaggagcgaaagtgggggtgtcctggggagaccagaaacctgccaagcccaggctggggccaaggactctgctgagaggcccctagagacaacacccttcccaggccactggctgctggactgttcctcaggagcggcctgggtacccagtatgtgcagggagacggaaccccatgtgacaggcccactccaccagggttcccaaagaacctggcccagtcataatcattcatcctcacagtggcaataatcacgataaccagt

SEQ ID NO: 116 - protein, 284 aa, Homo sapiens
MEPGNYATLDGAKDIEGLLGAGGGRNLVAHSPLTSHPAAPTLMPAVNYAPLDLPGSAEPPKQCHPCPGVPQGTSPAPVPYGYFGGGYYSCRVSRSSLKPCAQAATLAAYPAETPTAGEEYPSRPTEFAFYPGYPGTYHAMASYLDVSVVQTLGAPGEPRHDSLLPVDSYQSWALAGGWNSQMCCQGEQNPPGPFWKAAFADSSGQHPPDACAFRRGRKKRIPYSKGQLRELEREYAANKFITKDKRRKISAATSLSERQITIWFQNRRVKEKKVLAKVKNSATP

SEQ ID NO: 117 - DNA, 2856 bp, Homo sapiens
gtaaccgctactcccggacaccagaccaccgccttccgtacacaggggcccgcatcccaccctcccggacctaagagcctgggtcccctgtttccggaggtccgcttcccggcccccagattctggcatcccagccctcagtgtccaagacccaggcagcccgggtccccgcctcccggatccaggcgtccgggatctgcgccaccagaacctagcctcctgcagacctccgccatctgggggcactcaacctcctggagccaagggccccacgtcccacccagagaaactctcgtattcccagctcctagggccaaggaacccgggcgctccgaactcccagctttcggacatctggcacacggggcagagcagagaagctcagcgcccagcctggggaatttaaacactccagcttccaagagccaaggaacttcagtgctgtgaactcacaactctaaggagccctccaaagttccagtctccaggtgctgttactcaactcagtcctaggaacgtcgggtcctgggaaggagcccaagcgctcccagccagcttccaggcgctaagaaaccccggtgcttcccatcatggtggccgatcctcctcgagactccaaggggctcgcagcggcggagcccaccgccaacgggggcctggcgctggcctccatcgaggaccaaggcgcggcagcaggcggctactgcggttcccgggaccaggtgcgccgctgccttcgagccaacctgcttgtgctgctgacagtggtggccgtggtggccggcgtggcgctgggactgggggtgtcgggggccgggggtgcgctggcgttgggcccggagcgcttgagcgccttcgtcttcccgggcgagctgctgctgcgtctgctgcggatgatcatcttgccgctggtggtgtgcagcttgatcggcggcgccgccagcctggaccccggcgcgctcggccgtctgggcgcctgggcgctgctctttttcctggtcaccacgctgctggcgtcggcgctcggagtgggcttggcgctggctctgcagccgggcgccgcctccgccgccatcaacgcctccgtgggagccgcgggcagtgccgaaaatgcccccagcaaggaggtgctcgattcgttcctggatcttgcgagaaatatcttcccttccaacctggtgtcagcagcctttcgctcatactctaccacctatgaagagaggaatatcaccggaaccagggtgaaggtgcccgtggggcaggaggtggaggggatgaacatcctgggcttggtagtgtttgccatcgtctttggtgtggcgctgcggaagctggggcctgaaggggagctgcttatccgcttcttcaactccttcaatgaggccaccatggttctggtctcctggatcatgtggtacgcccctgtgggcatcatgttcctggtggctggcaagatcgtggagatggaggatgtgggtttactctttgcccgccttggcaagtacattctgtgctgcctgctgggtcacgccatccatgggctcctggtactgcccctcatctacttcctcttcacccgcaaaaacccctaccgcttcctgtggggcatcgtgacgccgctggccactgcctttgggacctcttccagttccgccacgctgccgctgatgatgaagtgcgtggaggagaataatggcgtggccaagcacatcagccgtttcatcctgcccatcggcgccaccgtcaacatggacggtgccgcgctcttccagtgcgtggccgcagtgttcattgcacagctcagccagcagtccttggacttcgtaaagatcatcaccatcctggtcacggccacagcgtccagcgtgggggcagcgggcatccctgctggaggtgtcctcactctggccatcatcctcgaagcagtcaacctcccggtcgaccatatctccttgatcctggctgtggactggctagtcgaccggtcctgtaccgtcctcaatgtagaaggtgacgctctgggggcaggactcctccaaaattatgtggaccgtacggagtcgagaagcacagagcctgagttgatacaagtgaagagtgagctgcccctggatccgctgccagtccccactgaggaaggaaaccccctcctcaaacactatcgggggcccgcaggggatgccacggtcgcctctgagaaggaatcagtcatgtaaaccccgggagggaccttccctgccctgctgggggtgctctttggacactggattatgaggaatggataaatggatgagctagggctctgggggtctgcctgcacactctggggagccaggggccccagcaccctccaggacaggagatctgggatgcctggctgctggagtacatgtgttcacaagggttactcctcaaaacccccagttctcactcatgtccccaactcaaggctagaaaacagcaagatggagaaataatgttctgctgcgtccccaccgtgacctgcctggcctcccctgtctcagggagcaggtcacaggtcaccatggggaattctagcccccactggggggatgttacaacaccatgctggttattttggcggctgtagttgtggggggatgtgtgtgtgcacgtgtgtgtgtgtgtgtgtgtgtgtgtgtgtgtgtgttctgtgacctcctgtccccatggtacgtcccaccctgtccccagatcccctattccctccacaataacagaaacactcccagggactctggggagaggctgaggacaaatacctgctgtcactccagaggacattttttttagcaataaaattgagtgtcaactatttaaaaaaaaaaaaaaaaa

SEQ ID NO: 118 - protein, 541 aa, Homo sapiens
MVADPPRDSKGLAAAEPTANGGLALASIEDQGAAAGGYCGSRDQVRRCLRANLLVLLTVVAVVAGVALGLGVSGAGGALALGPERLSAFVFPGELLLRLLRMIILPLVVCSLIGGAASLDPGALGRLGAWALLFFLVTTLLASALGVGLALALQPGAASAAINASVGAAGSAENAPSKEVLDSFLDLARNIFPSNLVSAAFRSYSTTYEERNITGTRVKVPVGQEVEGMNILGLVVFAIVFGVALRKLGPEGELLIRFFNSFNEATMVLVSWIMWYAPVGIMFLVAGKIVEMEDVGLLFARLGKYILCCLLGHAIHGLLVLPLIYFLFTRKNPYRFLWGIVTPLATAFGTSSSSATLPLMMKCVEENNGVAKHISRFILPIGATVNMDGAALFQCVAAVFIAQLSQQSLDFVKIITILVTATASSVGAAGIPAGGVLTLAIILEAVNLPVDHISLILAVDWLVDRSCTVLNVEGDALGAGLLQNYVDRTESRSTEPELIQVKSELPLDPLPVPTEEGNPLLKHYRGPAGDATVASEKESVM

SEQ ID NO: 119 - DNA, 1993 bp, Homo sapiens
ctagttaaggcggcacagggccgaggcgtagtgtgggtgactcctccgttccttgggtcccgtcgtctgtgatactgcagttcagccatggcagaaccgcagcccccgtccggcggcctcacggacgaggccgccctcagttgctgctccgacgcggaccccagtaccaaggattttctattgcagcagaccatgctacgagtgaaggatcctaagaagtcactggatttttatactagagttcttggaatgacgctaatccaaaaatgtgattttcccattatgaagttttcactctacttcttggcttatgaggataaaaatgacatccctaaagaaaaagatgaaaaaatagcctgggcgctctccagaaaagctacacttgagctgacacacaattggggcactgaagatgatgcgacccagagttaccacaatggcaattcagaccctcgaggattcggtcatattggaattgctgttcctgatgtatacagtgcttgtaaaaggtttgaagaactgggagtcaaatttgtgaagaaacctgatgatggtaaaatgaaaggcctggcatttattcaagatcctgatggctactggattgaaattttgaatcctaacaaaatggcaaccttaatgtagtgctgtgagaattctcctttgagatttcagaagaaaggaaacaatgtgattcaagatatttacataccagaagcatctaggactgatggatcactgtcccgattcaaattattcttcagtccatttccccttcctatttcagctgttccttttcacctaactgttcagtcattctggttttcaagcagtgctttatctcatgtccttgaatatagttgtgtaactttattttttaggtaataattagaacagttcccttcagaggctgcatttgccttcttctgccacctaaatattacttcccttcaaatctgcctttgaatcatcatttttaaaaaaaaattaacatgtttttgttgtagttatcttctggggtttcaattcctcagaaacaacttttttcacaacggaaaggaaagaacactagtgttctttcagtaaagtacaaagtgtttattttacaaaagagtaggtactcttgagagcaattcaaatcatgctgacaaggatactgatagaaaaagtgatttcttcttattataaagtacatttaaagttcaaggactaaccttatttatttgggaaaggggaggaggaaggaaatgatatggtacccagacactgggctaggctgcaactttatctcatttaatactcccagctgtcatgtgagaaagaaagcaggctaggcatgtgaaatcactttcatggattattaatggatttaagagggcatcaatcagctcaactcaagatttcataatcatttttagtatttagattgtgcctcaaagttgtagtacctcacaatacctccactggtttcctgttgtaaaaaccttcagtgagtttgaccattgtgctcttggctcttgggctggagtaccgtggtgagggagtaaacactagaagtctttagtacaaaactgctctagggacacctggtgattcctacacaagtgatgtttatatttctcataaagagtcttccctatcccaaggtcttcatgatgccagtagccatatatgataaattatgttcagtgataacttagttatcagaaatcagctcagtggtcttccccgccatgattcacatttgatgagtttttaaaaatcaaagtgattttgaaaatctctaatggctcagaaaataaaaacatccagtttgtggatgactatatttagatttctctagactctagtggaagacctttggaaaggccatgccaaccgtgcttgtactgctagaagcactttatgtttcctttttgggtgaaatggatttatgtgagtgctttaaacaaatagcaatacttatagactgaaataaaatgaaacttcaaataag

SEQ ID NO: 120 - protein, 184 aa, Homo sapiens
MAEPQPPSGGLTDEAALSCCSDADPSTKDFLLQQTMLRVKDPKKSLDFYTRVLGMTLIQKCDFPIMKFSLYFLAYEDKNDIPKEKDEKIAWALSRKATLELTHNWGTEDDATQSYHNGNSDPRGFGHIGIAVPDVYSACKRFEELGVKFVKKPDDGKMKGLAFIQDPDGYWIEILNPNKMATLM

SEQ ID NO: 121 - DNA, 808 bp, Homo sapiens
ccgacgccaggtcctgccgtcccgccgaccgtccgggagcgaacccgtcgtcccgcactggagtccgcgatggcttcagtgacagatggtaaacatggagtcaaagatgcctctgaccagaattttgactacatgtttaaactgcttatcattggcaacagcagtgttggcaagacctccttcctcttgcgctatgctgatgacacgttcaccccagccttcgttagcaccgtgggcatcgacttcaaggtgaagacagtctaccgtcacgagaagcgggtgaaactgcagatctgggacacagctgggcaggagcggtaccggaccatcacaacagcctattaccgtggggccatgggcttcattctgatgtatgacatcaccaatgaagagtccttcaatgctgtccaagactgggctactcagatcaagacctactcctgggacaatgcacaagttattctggtggggaacaagtgtgacatggaggaagagagggttgttcccactgagaagggccagctccttgcagagcagcttgggtttgatttctttgaagccagtgcaaaggagaacatcagtgtaaggcaggcctttgagcgcctggtggatgccatttgtgacaagatgtctgattcgctggacacagacccgtcgatgctgggctcctccaagaacacgcgtctctcggacaccccaccgctgctgcagcagaactgctcatgctagcaaggcccaccttcctgacctcccctcattgtggccccacacccaagtctgcttctccctgttacacactgtccgctct

SEQ ID NO: 122 - protein, 219 aa, Homo sapiens
MASVTDGKHGVKDASDQNFDYMFKLLIIGNSSVGKTSFLLRYADDTFTPAFVSTVGIDFKVKTVYRHEKRVKLQIWDTAGQERYRTITTAYYRGAMGFILMYDITNEESFNAVQDWATQIKTYSWDNAQVILVGNKCDMEEERVVPTEKGQLLAEQLGFDFFEASAKENISVRQAFERLVDAICDKMSDSLDTDPSMLGSSKNTRLSDTPPLLQQNCSC

SEQ ID NO: 123 - DNA, 5060 bp, Homo sapiens
acgcagagcgctgctgggctgccgggtctcccgcttcctcctcctgctccaagggcctcctgcatgagggcgcggtagagacccggacccgcgccgtgctcctgccgtttcgctgcgctccgcccgggcccggctcagccaggccccgcggtgagccatgattcgcctcggggctccccagtcgctggtgctgctgacgctgctcgtcgccgctgtccttcggtgtcagggccaggatgtccaggaggctggcagctgtgtgcaggatgggcagaggtataatgataaggatgtgtggaagccggagccctgccggatctgtgtctgtgacactgggactgtcctctgcgacgacataatctgtgaagacgtgaaagactgcctcagccctgagatccccttcggagagtgctgccccatctgcccaactgacctcgccactgccagtgggcaaccaggaccaaagggacagaaaggagaacctggagacatcaaggatattgtaggacccaaaggacctcctgggcctcagggacctgcaggggaacaaggacccagaggggatcgtggtgacaaaggtgaaaaaggtgcccctggacctcgtggcagagatggagaacctgggacccctggaaatcctggcccccctggtcctcccggcccccctggtccccctggtcttggtggaaactttgctgcccagatggctggaggatttgatgaaaaggctggtggcgcccagttgggagtaatgcaaggaccaatgggccccatgggacctcgaggacctccaggccctgcaggtgctcctgggcctcaaggatttcaaggcaatcctggtgaacctggtgaacctggtgtctctggtcccatgggtccccgtggtcctcctggtccccctggaaagcctggtgatgatggtgaagctggaaaacctggaaaagctggtgaaaggggtccgcctggtcctcagggtgctcgtggtttcccaggaaccccaggccttcctggtgtcaaaggtcacagaggttatccaggcctggacggtgctaagggagaggcgggtgctcctggtgtgaagggtgagagtggttccccgggtgagaacggatctccgggcccaatgggtcctcgtggcctgcctggtgaaagaggacggactggccctgctggcgctgcgggtgcccgaggcaacgatggtcagccaggccccgcaggtcctccgggtcctgtcggtcctgctggtggtcctggcttccctggtgctcctggagccaagggtgaagccggccccactggtgcccgtggtcctgaaggtgctcaaggtcctcgcggtgaacctggtactcctgggtcccctgggcctgctggtgcctccggtaaccctggaacagatggaattcctggagccaaaggatctgctggtgctcctggcattgctggtgctcctggcttccctgggccacggggtcctcctggccctcaaggtgcaactggtcctctgggcccgaaaggtcagacgggtgaacctggtattgctggcttcaaaggtgaacaaggccccaagggagaacctggccctgctggcccccagggagcccctggacccgctggtgaagaaggcaagagaggtgcccgtggagagcctggtggcgttgggcccatcggtccccctggagaaagaggtgctcccggaaaccgcggtttcccaggtcaagatggtctggcaggtcccaagggagcccctggagagcgagggcccagtggtcttgctggccccaagggagccaacggtgaccctggccgtcctggagaacctggccttcctggagcccggggtctcactggccgccctggtgatgctggtcctcaaggcaaagttggcccttctggagcccctggtgaagatggtcgtcctggacctccaggtcctcagggggctcgtgggcagcctggtgtcatgggtttccctggccccaaaggtgccaacggtgagcctggcaaagctggtgagaagggactgcctggtgctcctggtctgaggggtcttcctggcaaagatggtgagacaggtgctgcaggaccccctggccctgctggacctgctggtgaacgaggcgagcagggtgctcctgggccatctgggttccagggacttcctggccctcctggtcccccaggtgaaggtggaaaaccaggtgaccagggtgttcccggtgaagctggagcccctggcctcgtgggtcccaggggtgaacgaggtttcccaggtgaacgtggctctcccggtgcccagggcctccagggtccccgtggcctccccggcactcctggcactgatggtcccaaaggtgcatctggcccagcaggcccccctggcgcacagggccctccaggtcttcagggaatgcctggcgagaggggagcagctggtatcgctgggcccaaaggcgacaggggtgacgttggtgagaaaggccctgagggagcccctggaaaggatggtggacgaggcctgacaggtcccattggcccccctggcccagctggtgctaacggcgagaagggagaagttggacctcctggtcctgcaggaagtgctggtgctcgtggcgctccgggtgaacgtggagagactggcccccccggaccagcgggatttgctgggcctcctggtgctgatggccagcctggggccaagggtgagcaaggagaggccggccagaaaggcgatgctggtgcccctggtcctcagggcccctctggagcacctgggcctcagggtcctactggagtgactggtcctaaaggagcccgaggtgcccaaggccccccgggagccactggattccctggagctgctggccgcgttggacccccaggctccaatggcaaccctggaccccctggtccccctggtccttctggaaaagatggtcccaaaggtgctcgaggagacagcggcccccctggccgagctggtgaacccggcctccaaggtcctgctggaccccctggcgagaagggagagcctggagatgacggtccctctggtgccgaaggtccaccaggtccccagggtctggctggtcagagaggcatcgtcggtctgcctgggcaacgtggtgagagaggattccctggcttgcctggcccatcgggtgagcccggcaagcagggtgctcctggagcatctggagacagaggtcctcctggccccgtgggtcctcctggcctgacgggtcctgcaggtgaacccggacgagagggaagccccggtgctgatggcccccctggcagagatggcgctgctggagtcaagggtgatcgtggtgagactggtgctgtgggagctcctggagcccctgggccccctggctcccctggccccgctggtccaactggcaagcaaggagacagaggagaagctggtgcacaaggccccatgggaccctcaggaccagctggagcccggggaatccagggtcctcaaggccccagaggtgacaaaggagaggctggagagcctggcgagagaggcctgaagggacaccgtggcttcactggtctgcagggtctgcccggccctcctggtccttctggagaccaaggtgcttctggtcctgctggtccttctggccctagaggtcctcctggccccgtcggtccctctggcaaagatggtgctaatggaatccctggccccattgggcctcctggtccccgtggacgatcaggcgaaaccggtcctgctggtcctcctggaaatcctgggccccctggtcctccaggtccccctggccctggcatcgacatgtccgcctttgctggcttaggcccgagagagaagggccccgaccccctgcagtacatgcgggccgaccaggcagccggtggcctgagacagcatgacgccgaggtggatgccacactcaagtccctcaacaaccagattgagagcatccgcagccccgagggctcccgcaagaaccctgctcgcacctgcagagacctgaaactctgccaccctgagtggaagagtggagactactggattgaccccaaccaaggctgcaccttggacgccatgaaggttttctgcaacatggagactggcgagacttgcgtctaccccaatccagcaaacgttcccaagaagaactggtggagcagcaagagcaaggagaagaaacacatctggtttggagaaaccatcaatggtggcttccatttcagctatggagatgacaatctggctcccaacactgccaacgtccagatgaccttcctacgcctgctgtccacggaaggctcccagaacatcacctaccactgcaagaacagcattgcctatctggacgaagcagctggcaacctcaagaaggccctgctcatccagggctccaatgacgtggagatccgggcagagggcaatagcaggttcacgtacactgccctgaaggatggctgcacgaaacataccggtaagtggggcaagactgttatcgagtaccggtcacagaagacctcacgcctccccatcattgacattgcacccatggacataggagggcccgagcaggaattcggtgtggacatagggccggtctgcttcttgtaaaaacctgaacccagaaacaacacaatccgttgcaaacccaaaggacccaagtactttccaatctcagtcactctaggactctgcactgaatggctgacctgacctgatgtccattcatcccaccctctcacagttcggacttttctcccctctctttctaagagacctgaactgggcagactgcaaaataaaatctcggtgttctatttatttattgtcttcctgtaagaccttcgggtcaaggcagaggcaggaaactaactggtgtgagtcaaatgccccctgagtgactgcccccagcccaggccagaagacctcccttcaggtgccgggcgcaggaactgtgtgtgtcctacacaatggtgctattctgtgtcaaacacctctgtattttttaaaacatcaattgatattaaaaatgaaaagattattggaaagt

SEQ ID NO: 124 - protein, 1487 aa, Homo sapiens
MIRLGAPQSLVLLTLLVAAVLRCQGQDVQEAGSCVQDGQRYNDKDVWKPEPCRICVCDTGTVLCDDIICEDVKDCLSPEIPFGECCPICPTDLATASGQPGPKGQKGEPGDIKDIVGPKGPPGPQGPAGEQGPRGDRGDKGEKGAPGPRGRDGEPGTPGNPGPPGPPGPPGPPGLGGNFAAQMAGGFDEKAGGAQLGVMQGPMGPMGPRGPPGPAGAPGPQGFQGNPGEPGEPGVSGPMGPRGPPGPPGKPGDDGEAGKPGKAGERGPPGPQGARGFPGTPGLPGVKGHRGYPGLDGAKGEAGAPGVKGESGSPGENGSPGPMGPRGLPGERGRTGPAGAAGARGNDGQPGPAGPPGPVGPAGGPGFPGAPGAKGEAGPTGARGPEGAQGPRGEPGTPGSPGPAGASGNPGTDGIPGAKGSAGAPGIAGAPGFPGPRGPPGPQGATGPLGPKGQTGEPGIAGFKGEQGPKGEPGPAGPQGAPGPAGEEGKRGARGEPGGVGPIGPPGERGAPGNRGFPGQDGLAGPKGAPGERGPSGLAGPKGANGDPGRPGEPGLPGARGLTGRPGDAGPQGKVGPSGAPGEDGRPGPPGPQGARGQPGVMGFPGPKGANGEPGKAGEKGLPGAPGLRGLPGKDGETGAAGPPGPAGPAGERGEQGAPGPSGFQGLPGPPGPPGEGGKPGDQGVPGEAGAPGLVGPRGERGFPGERGSPGAQGLQGPRGLPGTPGTDGPKGASGPAGPPGAQGPPGLQGMPGERGAAGIAGPKGDRGDVGEKGPEGAPGKDGGRGLTGPIGPPGPAGANGEKGEVGPPGPAGSAGARGAPGERGETGPPGPAGFAGPPGADGQPGAKGEQGEAGQKGDAGAPGPQGPSGAPGPQGPTGVTGPKGARGAQGPPGATGFPGAAGRVGPPGSNGNPGPPGPPGPSGKDGPKGARGDSGPPGRAGEPGLQGPAGPPGEKGEPGDDGPSGAEGPPGPQGLAGQRGIVGLPGQRGERGFPGLPGPSGEPGKQGAPGASGDRGPPGPVGPPGLTGPAGEPGREGSPGADGPPGRDGAAGVKGDRGETGAVGAPGAPGPPGSPGPAGPTGKQGDRGEAGAQGPMGPSGPAGARGIQGPQGPRGDKGEAGEPGERGLKGHRGFTGLQGLPGPPGPSGDQGASGPAGPSGPRGPPGPVGPSGKDGANGIPGPIGPPGPRGRSGETGPAGPPGNPGPPGPPGPPGPGIDMSAFAGLGPREKGPDPLQYMRADQAAGGLRQHDAEVDATLKSLNNQIESIRSPEGSRKNPARTCRDLKLCHPEWKSGDYWIDPNQGCTLDAMKVFCNMETGETCVYPNPANVPKKNWWSSKSKEKKHIWFGETINGGFHFSYGDDNLAPNTANVQMTFLRLLSTEGSQNITYHCKNSIAYLDEAAGNLKKALLIQGSNDVEIRAEGNSRFTYTALKDGCTKHTGKWGKTVIEYRSQKTSRLPIIDIAPMDIGGPEQEFGVDIGPVCFL

SEQ ID NO: 125 - DNA, 1505 bp, Homo sapiens
gctggtcggaggctcgcagtgctgtcggcgagaagcagtcgggtttggagcgcttgggtcgcgttggtgcgcggtggaacgcgcccagggaccccagttcccgcgagcagctccgcgccgcgcctgagagactaagctgaaactgctgctcagctcccaagatggtgccacccaaattgcatgtgcttttctgcctctgcggctgcctggctgtggtttatccttttgactggcaatacataaatcctgttgcccatatgaaatcatcagcatgggtcaacaaaatacaagtactgatggctgctgcaagctttggccaaactaaaatcccccggggaaatgggccttattccgttggttgtacagacttaatgtttgatcacactaataagggcaccttcttgcgtttatattatccatcccaagataatgatcgccttgacaccctttggatcccaaataaagaatatttttggggtcttagcaaatttcttggaacacactggcttatgggcaacattttgaggttactctttggttcaatgacaactcctgcaaactggaattcccctctgaggcctggtgaaaaatatccacttgttgttttttctcatggtcttggggcattcaggacactttattctgctattggcattgacctggcatctcatgggtttatagttgctgctgtagaacacagagatagatctgcatctgcaacttactatttcaaggaccaatctgctgcagaaataggggacaagtcttggctctaccttagaaccctgaaacaagaggaggagacacatatacgaaatgagcaggtacggcaaagagcaaaagaatgttcccaagctctcagtctgattcttgacattgatcatggaaagccagtgaagaatgcattagatttaaagtttgatatggaacaactgaaggactctattgatagggaaaaaatagcagtaattggacattcttttggtggagcaacggttattcagactcttagtgaagatcagagattcagatgtggtattgccctggatgcatggatgtttccactgggtgatgaagtatattccagaattcctcagcccctcttttttatcaactctgaatatttccaatatcctgctaatatcataaaaatgaaaaaatgctactcacctgataaagaaagaaagatgattacaatcaggggttcagtccaccagaattttgctgacttcacttttgcaactggcaaaataattggacacatgctcaaattaaagggagacatagattcaaatgtagctattgatcttagcaacaaagcttcattagcattcttacaaaagcatttaggacttcataaagattttgatcagtgggactgcttgattgaaggagatgatgagaatcttattccagggaccaacattaacacaaccaatcaacacatcatgttacagaactcttcaggaatagagaaatacaattaggattaaaataggtttttt

SEQ ID NO: 126 - protein, 441 aa, Homo sapiens
MVPPKLHVLFCLCGCLAVVYPFDWQYINPVAHMKSSAWVNKIQVLMAAASFGQTKIPRGNGPYSVGCTDLMFDHTNKGTFLRLYYPSQDNDRLDTLWIPNKEYFWGLSKFLGTHWLMGNILRLLFGSMTTPANWNSPLRPGEKYPLVVFSHGLGAFRTLYSAIGIDLASHGFIVAAVEHRDRSASATYYFKDQSAAEIGDKSWLYLRTLKQEEETHIRNEQVRQRAKECSQALSLILDIDHGKPVKNALDLKFDMEQLKDSIDREKIAVIGHSFGGATVIQTLSEDQRFRCGIALDAWMFPLGDEVYSRIPQPLFFINSEYFQYPANIIKMKKCYSPDKERKMITIRGSVHQNFADFTFATGKIIGHMLKLKGDIDSNVAIDLSNKASLAFLQKHLGLHKDFDQWDCLIEGDDENLIPGTNINTTNQHIMLQNSSGIEKYN

SEQ ID NO: 127 - DNA, 1758 bp, Homo sapiens
cacgagcggcacgaggatttccagctcagcgatgcccccaggtccctgggagagctgcttctgggtggggggcctcattttgtggctcagcgttggaagttcaggggatgcacctcctaccccacagccaaagtgcgctgacttccagagcgccaacctttttgaaggcaccgatctcaaagtccagtttctcctctttgtcccttcgaatcctagctgtgggcagctagtagaaggaagcagtgacctccaaaactctgggttcaatgccactctgggaaccaaactaattatccatggattcagggttttaggaacaaagccttcctggattgacacatttattagaacccttctgcgtgcaacgaatgctaatgtgattgccgtggactggatttatgggtctacaggagtctacttctcagctgtgaaaaatgtgattaagttgagcctcgagatctcccttttcctcaataaactcctggtgctgggtgtgtcggaatcctcaatccacatcattggtgttagcctgggggcccacgttgggggcatggtgggacagctcttcggaggccagctgggacagatcacaggcctggaccccgctggacctgagtacaccagggccagtgtggaagagcgcttggatgctggagatgccctcttcgtggaagccatccacacagacaccgacaatttgggtattcggattcccgttggacatgtggactacttcgtcaacggaggccaagaccaacctggctgccccaccttcttttacgcaggttatagttatctgatctgtgatcacatgagggctgtgcacctctacatcagcgccctggagaattcctgtccactgatggcctttccctgtgccagctacaaggccttccttgctggacgctgtctggattgctttaacccttttctgctttcctgcccaaggataggactggtggaacaaggtggtgtcaagatagagccgctccccaaggaagtgaaagtctacctcctgactacttccagtgctccgtactgcatgcatcacagcctcgtggagtttcacttgaaggaactgagaaacaaggacaccaacatcgaggttaccttccttagcagtaacatcacctcttcatctaagatcaccatacctaagcagcaacgctatgggaaaggaatcatagcccatgccaccccacaatgccagataaaccaagtgaaattcaagtttcagtcttccaaccgagtttggaaaaaagaccggactaccattattgggaagttctgcactgcccttttgcctgtcaatgacagagaaaagatggtctgcttacctgaaccagtgaacttacaagcaagtgtgactgtttcctgtgacctgaagatagcctgtgtgtagtttaacctgggcaggacacatctccctgcattttttttttttttttttgagagagaggtgtgatgagggatgtgtgtgtgcagcttattgtagaccattactactaaggagaaaagcaaagctctttcttattttcctcataatcagctaccctggaggggagggagaactcattttacagaacttggtttcctttgccgatcttatgtacatacccattttagctttcccatgcatacttaactgcacttgctttatctccttgggcattcgtacttaggattcaatagaaacatgtacagggtaaacaattttttaaaaataaaacttcatggagtaaaaaaaaaaaaaaaaaa

SEQ ID NO: 128 - protein, 456 aa, Homo sapiens
MPPGPWESCFWVGGLILWLSVGSSGDAPPTPQPKCADFQSANLFEGTDLKVQFLLFVPSNPSCGQLVEGSSDLQNSGFNATLGTKLIIHGFRVLGTKPSWIDTFIRTLLRATNANVIAVDWIYGSTGVYFSAVKNVIKLSLEISLFLNKLLVLGVSESSIHIIGVSLGAHVGGMVGQLFGGQLGQITGLDPAGPEYTRASVEERLDAGDALFVEAIHTDTDNLGIRIPVGHVDYFVNGGQDQPGCPTFFYAGYSYLICDHMRAVHLYISALENSCPLMAFPCASYKAFLAGRCLDCFNPFLLSCPRIGLVEQGGVKIEPLPKEVKVYLLTTSSAPYCMHHSLVEFHLKELRNKDTNIEVTFLSSNITSSSKITIPKQQRYGKGIIAHATPQCQINQVKFKFQSSNRVWKKDRTTIIGKFCTALLPVNDREKMVCLPEPVNLQASVTVSCDLKIACV

SEQ ID NO: 129 - DNA, 2238 bp, Homo sapiens
cgttgccgggtcgcaggtcccgccagtgcgagcgcaacggaggtcgaaggcgttcagactcttagctgaacgcggagctgcggcggctatgctgtggagcggctgccggcgtttcggggcgcgcctcggctgcctgcccggcggtctccgggtcctcgtccagaccggccaccggagcttgacctcctgcatcgacccttccatgggacttaatgaagagcagaaagaatttcaaaaagtggcctttgactttgctgcccgagagatggctccaaatatggcagagtgggaccagaaggagctgttcccagtggatgtgatgcggaaggcagcccagctaggcttcggaggggtctacatacaaacagatgtgggcgggtctgggctgtcacgtcttgatacctctgtcatttttgaagccttggctacaggctgcaccagcaccacagcctatataagcatccacaacatgtgtgcctggatgattgatagcttcggaaatgaggaacagaggcacaaattttgcccaccgctctgtaccatggagaagtttgcttcctactgcctcactgaaccaggaagtgggagtgatgctgcctctcttctgacctccgctaagaaacagggagatcattacatcctcaatggctccaaggccttcatcagtggtgctggtgagtcagacatctatgtggtcatgtgccgaacaggaggaccaggccccaagggcatctcatgcatagttgttgagaaggggacccctggcctcagctttggcaagaaggagaaaaaggtggggtggaactcccagccaacacgagctgtgatcttcgaagactgtgctgtccctgtggccaacagaattgggagcgaggggcagggcttcctcattgccgtgagaggactgaacggagggaggatcaatattgcttcctgctccctgggggctgcccacgcctctgtcatcctcacccgagaccacctcaatgtccggaagcagtttggagagcctctggccagtaaccagtacttgcaattcacactggctgatatggcaacaaggctggtggccgcgcggctgatggtccgcaatgcagcagtggctctgcaggaggagaggaaggatgcagtggccttgtgctccatggccaagctctttgctacagatgaatgctttgccatctgcaaccaggccttgcagatgcacgggggctacggctacctgaaggattacgctgttcagcagtacgtgcgggactccagggtccaccagattctagaaggtagcaatgaagtgatgaggatactgatctctagaagcctgcttcaggagtagaacccacacttgttctggcctggtgttcagtgcgactgcagtcagtgttgagtggtgccatgtgggccgctctattccaaaggaatcatggattagacccaagggctgagctcctctagggcaggacctgcaccctgtgtgttggcaccagcatcgggtcttggactggggcagaatccccagtggaaccggaagagctggactgatgagaaacatcagaagaacacatactaccttgttttcctaatgccagaagggtgaccagtgaagattcaccgtcaaaccatgaaagtcctttcttggatccactttatcttgattagtctgcattttactagttcactggatccctcctctaggggcctggggactttcactgatgctcttcctgattctagagcaaaggtgtgggaaggggaaatggaggaatgccctcctgtctgtgtcgttctctgtgccacagctacagatgcagaaggtttctctggatagcacacctctgaatgtaaatcatgataaaatggatatttggaaacttactcctaagctgtgatgtagggtgtatttctacttctggactgcctcaatatcaagggctgagacttttgaatgttgaatattcgttgggtttcatgttaagacgcctgtggtccaggagtgctattcagtgtttctgttcctgataaacactttgaatatttttttgtgtttttgtttccttttctgaagctgttcctccttttaaatatttttaatcacattgataaaatctatccttcatccacctctggttctactatagttgatttttattttaaatgtttaattgtatttgattaaacacttaactggattttggaataataaaactctcgtccaatttggcttttaaaaaaaaaaaa

SEQ ID NO: 130 - protein, 415 aa, Homo sapiens
MLWSGCRRFGARLGCLPGGLRVLVQTGHRSLTSCIDPSMGLNEEQKEFQKVAFDFAAREMAPNMAEWDQKELFPVDVMRKAAQLGFGGVYIQTDVGGSGLSRLDTSVIFEALATGCTSTTAYISIHNMCAWMIDSFGNEEQRHKFCPPLCTMEKFASYCLTEPGSGSDAASLLTSAKKQGDHYILNGSKAFISGAGESDIYVVMCRTGGPGPKGISCIVVEKGTPGLSFGKKEKKVGWNSQPTRAVIFEDCAVPVANRIGSEGQGFLIAVRGLNGGRINIASCSLGAAHASVILTRDHLNVRKQFGEPLASNQYLQFTLADMATRLVAARLMVRNAAVALQEERKDAVALCSMAKLFATDECFAICNQALQMHGGYGYLKDYAVQQYVRDSRVHQILEGSNEVMRILISRSLLQE

SEQ ID NO: 131 - DNA, 6735 bp, Homo sapiens
gcctgcagagagaggcactttgcaccacagacagatagcaagaagggaaagacagagagtgagaaaaaagaggagtcagtcgctcctggggaagggagagagtgagactgggagaaagagaagcacagaaagtgtgtgtaaaacggagtaaagaaagaaaaaaaaaaaactacccttaaagcacatttaaaaaaaaaaaactctggcaattcaagaaagaaacaggctacgtttaaagagcatagagacaatgaaaggctaaagaaaattttaaaatctctgccacagtctcataggtgcttggaaatgaaagtagaactgcctgtctttaacggactctgacagaggtaactggattagggacgagtacgccagctttttttttttttttttttttttttttaacatcttaaatcctgaaaaaaaaaaaaaaaaaaaaaaaaaggcagcagctccgaattgaatgaattgatgggcacactccaactgctgggctggagagactggacttagtcttgccatttctgcttctttgaaagaggagacaacttgggcttccttttaatttagttttttttccccttctcccccaacccccaaccttcccccttacctcccccaccccctttatcaccaccccccttttaaataagagggtgaaggggaaccagagcgcacaagggaactgactcaggaggcagagaagatgggcatcctcagcgtagacttgctgatcacactgcaaattctgccagtttttttctccaactgcctcttcctggctctctatgactcggtcattctgctcaagcacgtggtgctgctgttgagccgctccaagtccactcgcggagagtggcggcgcatgctgacctcagagggactgcgctgcgtctggaagagcttcctcctcgatgcctacaaacaggtgaaattgggtgaggatgcccccaattccagtgtggtgcatgtctccagtacagaaggaggtgacaacagtggcaatggtacccaggagaagatagctgagggagccacatgccaccttcttgactttgccagccctgagcgcccactagtggtcaactttggctcagccacttgacctcctttcacgagccagctgccagccttccgcaaactggtggaagagttctcctcagtggctgacttcctgctggtctacattgatgaggctcatccatcagatggctgggcgataccgggggactcctctttgtcttttgaggtgaagaagcaccagaaccaggaagatcgatgtgcagcagcccagcagcttctggagcgtttctccttgccgccccagtgccgagttgtggctgaccgcatggacaataacgccaacatagcttacggggtagcctttgaacgtgtgtgcattgtgcagagacagaaaattgcttatctgggaggaaagggccccttctcctacaaccttcaagaagtccggcattggctggagaagaatttcagcaagagatgaaagaaaactagattagctggttaaaggtatgattataagagagcttattgttttaaaaagttatataaaggcaaggaaattaagaactgaatccatatttcaacagagccctattggcttactgaaagacaggagtttatctatcggaagaacatgaatctctaacagctccatacttctttcactactcaaatggcattgggctgagtaagtaaccatatcacctctcttcttagtaaaaagccctatgtgaaaagatcccaagatggagaggaagaaacgctaattcagcatgtgttcattctgcattgagaaggaactgatacatctgatgcatgctttgagaccagaagaaaagacttacctgaataattactacattagggaagctactgtctacgttaagataaagggtattgccttggctctatttggcatggatggagcccagttggaaaattcccaaatattacaacaagtccttgaacccaggccatgtggttagacgttggtgttaaggttagaccttatgttagagtcatttctgatgttccagcttctagccatgtagtgctctcagtcttcataccccagaaattattggtatatttgtagataccgagaatgatccctcagtctgagaggttagaatgatcatctgtaatctgagggttaatttctaggcaggtggagagagtggtaaaaaagaaatgaaattgacaagctaggaaagaggaggcagaaagatttggaaaattcacagagtttcacccttaagctgtagagagtgggtcacatttgttagccacggaaacatagaaacatacacaaggccagaaaaagaagaaggagctcaactaaaagtggcatagagaatacacatataaaaacaatatatttgtcatatgctcctagagaggagaaaggggtgattgaaagaaaaaaaaatacttaaatatttgtaattgtgaggggtttcttttggaaataattacttttgaaccatgtatgtggtatgtatattttcagtgggttaattataccccatgatacctattaaaggaaaaccagtgggtctggtggtgctggtcttttcctccccattcctacaatttctatgtggcccaagtcattcctaatcttggtctctatagcagtgttctctctgaatgctgagctgaagaaattatacgtacatacacacatacatacatacatacaaatatatgtatatatattctcagctgctgcgggaggtaggtaccatggccattcagcacagccttgatttcctcccaaagtaggtgagctatagtgaagaataggtgcaaacaaacaagcttacttccattgcaaaatagaagaagaggaagttagagataattctgatcaatcattttggaggctttgttataaggcaacccccggtatatcatggaatttccattgacatttgaatttggacttggatcttcccttggtcccattagctgaggtttagtaatctaaagtccctatagtatatgattataatgctattttaaaaaatatatatataaaatatttttttctttttaaaatagacactatagttttacccataagtaatatttaaagattatagctcccaaaagaatggaccaaccactttcgtatcataatttctttttggtaaatatgagactattatgaaatcatagtatatgattgtatttaaaggtacaatcaaaggatcttttgtccattccattaataactgaataaaaaataaataaaatggatagaaaaaaactaaagttgaaaatacattcttaaactagttgtctgaaatgagaaaagagtgagaactaggtgtgcaagaaccaaacgtattttattttattttttaaatgggagcaacatatcagtcgtgtcaccagctggtatattgtgtaaatattaaagctccattgggactgatttttcatggcaacatcagctttctaatgttctaaattctataaaaaccacccacaaagaaacaaagcaaatttcattatctaatgagttgctggaaaatcatattgagaataattatttcagattcctcagttgttaacttctacattcaagggcttatctctgcccccattgatttttaacctcaaaatggtgtgagatttactgtggaaccctaaagcagtaaaataaaaaacctggttgcagcacattcacactgttgtccttaaaattccccttttttctctatgtacgataaagtaacagtatgtcagataagccggtggggggatgagattaggctgaggcagtgctagtcaactgggggaaaaggatgatggaaaaatcacccagttgtgctatatttttaaagaaggaggtcgtttatgtgtgcagacaattctccctgaggttagcccaatggagaaatgaagcagaggaaggaaacatagaaagacatgggctatcagggaggaagatgttcaatagaacatgcaagaatttctggaagaaaggctgtggaagggccaatggagaaaatgaatggacaaagctcaggaatccctacgctatgtagaatgttcttggtgttatcagggttaagccctgtaattatgtaacctatttatcgcaacatgaatttttatgatttcttgtgatgtattcttttatgaaattaacaagaactcattattttgaggtagaggaaaatcaatgctttatctgatatgctgagaaattattagattgccaatactcatgtgcgtttcatgtgttttataaggtttgttcctttgaagaattgtagttcttagtcccacagggaaatgtgtatctatttatatatcatagtataaatctatgatatatttatatcatatataaaagtctgagttctctttcttagtccctaatcatgtttctcccataggctgtgtttacatggagctatcggtttagccttttaagcttcattagcttgtctattattgaaatagtttccaagaaattttagatattatcataacatctgggtctactcaaacacttattgtttgaaagacttatgtcttggacctatcaaaaactgactttatttattgcttagtgaaaatactagtgggatcaacaatgattttcttgaatgggcatgaatggagatgcccgcacagtaatgtagaaatgtttcatacagctattaaaatgtaactgacctccttagaggcagattagtaactgttcctactttgtatagctaagtgacagtcacttaacttacatgactttcttttttcacattgggtctctggtcctgtgtcttcacctcatttatagcacgtctccttgatttttggtagtatcaacttcccagtgatctgttcagttaagttcttctcccgttaaccaggaagtgcttattctctcatcacagtgggaagaatagcctattgtctttcattttgcctgagtgtattttactatttgggctctgaaataaaaattatgaaatatggtgaggtcacatgttggtgctgccttgctgcataaaattctaggagggcaggttaggagacagttatgtatggcctttcgggaaaattcaaagggtgggattacaagggtgttcctcaggcatgcccctatgggccctatgtggaagcaagaagaattgactgatttacaggacttctctttatgtcaatcttaagaggatggatgaatctggacatttgttccacccgacctctgactgatggtttggaaaataactttaattaggatcatatgaccattgaaaaaggaaaaatgtagactctgacttccgtcccactgaaggattaatgaaaacctttactagcatttagagcttttcagaacatccccactgtcatgtgtctcagcagtggagactgcaagtaaggcttttaattttaggaggtttttttttttttttttttttcccctaaatggtatggccaaaagtcagagttaaaatatatatagttagattccaacttcctccttcactctaaaaatagaatccaaacccactcttcatatatgcttccagaatggggcttaagtaccaatctctgctttgcaatgggcacaatcttggtcatgtcctgaggctctctaagaaaagagaggatctaggatgggagagctagaaagttgctaactgggaagaacaaggccctgaggggttggtctaccaatctgggaagatttgaaaacaaacttctcgcaactgaaggaaggctgaaggctgctgcaagtcattgagtgactttaggatgagcaaaacattgggccacttcctaatgccctatgtgtatagtaccagaagcaaggtctcagacttaacagacccagctctgttccaaggtgagtctgaaccaatagaaagcaaacatgtgcagatatccaaacaagactgctcatgcaagtcggggctggctacccgtcttaggcagcaacagcagagctccagggagcttattcaatatttactgagacttcgaagacccagcagatgtttaatgaagtcactattttggctcaaaccctccacttctccccctcccctcaaaaagccaacaggtaaacacataaatgaaagaaacccacagaaggggatgggaaataaagaaaattctctcaagacttctccaggcccatgtcactggtcagcgtggtttttatgtgtattaggattgggggatgtgaagaaataagtatccagtactttataaccaaagcaattaaatgatattggggtagggaatgttggccagttttgtttagttttgccatcacattgtcacccagacctcacctagccccaagtaatcgggcgccccgaagagggagacagagatgtgccagagttgacccagtgtgcggatgataactactgacgaaagagtcatcgacctcagttagtggttggatgtagtcacattagtttgcctctccccatctttgtctccctggcaaggagaatatgcgggacatgatgctaagagccctgggtaaatgtggtgagaatgcacgcgtgcatatgctacacatatgtgcttctcagttgcagaaaatgaactgctttgggagattatcagtagaaagagtgttatcatattggtgctgagtgctatgtgtgcttatacaatttgttcttgtattttaataaactttgaataaaagaataaaaaaaaaaaaaaaaaaaaaaa

SEQ ID NO: 132 - protein, 273 aa, Homo sapiens
  MOD_RES (133)..(133): Variable amino acid
  MOD_RES (266)..(266): Variable amino acid
MGILSVDLLITLQILPVFFSNCLFLALYDSVILLKHVVLLLSRSKSTRGEWRRMLTSEGLRCVWKSFLLDAYKQVKLGEDAPNSSVVHVSSTEGGDNSGNGTQEKIAEGATCHLLDFASPERPLVVNFGSATXPPFTSQLPAFRKLVEEFSSVADFLLVYIDEAHPSDGWAIPGDSSLSFEVKKHQNQEDRCAAAQQLLERFSLPPQCRVVADRMDNNANIAYGVAFERVCIVQRQKIAYLGGKGPFSYNLQEVRHWLEKNFSKRXKKTRLAG

SEQ ID NO: 133 - DNA, 2685 bp, Homo sapiens
caggcgtgtcccagggggagccccgctctgcagccctgtgcgccgtagagagctggacttaggctggcagcatggccgagttcagggtcagggtgtccaccggagaagccttcggggctggcacatgggacaaagtgtctgtcagcatcgtggggacccggggagagagccccccactgcccctggacaatctcggcaaggagttcactgcgggcgctgaggaggacttccaggtgacgctcccggaggacgtaggccgagtgctgctgctgcgcgtgcacaaggcgcccccagtgctgcccctgctggggcccctggccccggatgcctggttctgccgctggttccagctgacaccgccgcggggcggccacctcctcttcccctgctaccagtggctggagggggcggggaccctggtgctgcaggagggtacagccaaggtgtcctgggcagaccaccaccctgtgctccagcaacagcgccaggaggagcttcaggcccggcaggagatgtaccagtggaaggcttacaacccaggttggcctcactgcctggatgaaaagacagtggaagacttggagctcaatatcaaatactccacagccaagaatgccaacttttatctacaagctggctctgcttttgcagagatgaaaatcaaggggttgctggaccgcaaggggctctggaggagtctgaatgagatgaaaaggatcttcaacttccggaggaccccagcagctgagcacgcatttgagcactggcaggaggatgccttcttcgcctcccagttcctgaatggtctcaaccctgtcctgatccgccgctgtcactacctcccaaagaacttccccgtcactgatgccatggtggcctcattgttgggtcctgggaccagcttgcaggctgagctagagaagggctccctgttcttggtggatcacggcatcctctctggcatccagaccaatgtcattaatgggaagccgcagttctctgcggccccaatgaccctgctataccagagcccaggctgcgggccgctgctgcctctcgccatccagctcagccagacccccggcccaaacagccccatcttcctgcccactgatgacaagtgggactggttgctggccaagacctgggtgcgcaatgccgagttctccttccatgaggccctcacgcacctgctgcactcacatctgctgcctgaggtcttcaccctggctaccctgcgtcagctgccccactgccaccctctcttcaagctgctgatcccgcacacccgatacaccctgcacatcaacacactcgcccgggagctgcttatcgtgccagggcaggtggtggacaggtccacaggcatcggcattgaaggcttctctgagttgatacagaggaacatgaagcagctgaactattctctcctgtgtctgcctgaggatatccggacccgaggagttgaagacatcccaggctactactaccgtgatgatgggatgcagatttggggtgcagtggaacgctttgtctctgaaatcatcggtatctactacccaagtgatgagtctgtccaagatgacagagagctccaggcctgggtcagagagatcttctccaagggcttcctaaaccaggagagctcaggtatcccttcctcactggagacccgggaagccctggtgcagtatgtcaccatggtgatattcacctgctcagccaagcatgcggctgtcagtgcagggcagtttgactcctgtgcttggatgcccaacctgccacccagcatgcagctgccaccacccacctccaaaggcctggcaacatgcgagggcttcatagccaccctcccacctgtcaatgccacatgtgatgtcatccttgctctctggttgctgagcaaggagcctggagaccaaaggcccctgggcacctatccggatgagcacttcacagaggaggcccctcggcggagcatcgccaccttccagagccgcctggcccagatctcgaggggcatccaggagcggaaccggggcctggtgctgccctacacctacctagaccctcccctcatcgagaacagcgtctccatctaaatcccaggggaacacaggcccagatgacatccctttgaccacatcgctctaggataactggcacccagagaaaaggactcctcagaaaaaacaggcccccatgtgcctctcctgggacaaccagactctgtaactcacccccaccaccatacacacacacaaaaacagaaacaaaatcaaaacagagaaagcagaaaatctaccaagaacagagtctcaggacagaaccactgagtcttttggaggctccaagcctcaaagtgcccgcagagcccaccttgagggttttgctagttggttttgttttgcgtttacagccgtggggggaagcacataatcccgccccagggcccactagcatccactgattggaccttatggtcacccaactcaaggacagccaccaagaagtggctgccaaagagactgggcgcagtggctcatgcccataatcccagcactttgggagatggaggcgggaaaatcatttgaggtcagaagttcaaggccagcctggacgacatagcgagactccacctctaccaaaaaataaaaattaaaaaacaaaaaaaaaaaaaaaaaa

SEQ ID NO: 134 - protein, 676 aa, Homo sapiens
MAEFRVRVSTGEAFGAGTWDKVSVSIVGTRGESPPLPLDNLGKEFTAGAEEDFQVTLPEDVGRVLLLRVHKAPPVLPLLGPLAPDAWFCRWFQLTPPRGGHLLFPCYQWLEGAGTLVLQEGTAKVSWADHHPVLQQQRQEELQARQEMYQWKAYNPGWPHCLDEKTVEDLELNIKYSTAKNANFYLQAGSAFAEMKIKGLLDRKGLWRSLNEMKRIFNFRRTPAAEHAFEHWQEDAFFASQFLNGLNPVLIRRCHYLPKNFPVTDAMVASLLGPGTSLQAELEKGSLFLVDHGILSGIQTNVINGKPQFSAAPMTLLYQSPGCGPLLPLAIQLSQTPGPNSPIFLPTDDKWDWLLAKTWVRNAEFSFHEALTHLLHSHLLPEVFTLATLRQLPHCHPLFKLLIPHTRYTLHINTLARELLIVPGQVVDRSTGIGIEGFSELIQRNMKQLNYSLLCLPEDIRTRGVEDIPGYYYRDDGMQIWGAVERFVSEIIGIYYPSDESVQDDRELQAWVREIFSKGFLNQESSGIPSSLETREALVQYVTMVIFTCSAKHAAVSAGQFDSCAWMPNLPPSMQLPPPTSKGLATCEGFIATLPPVNATCDVILALWLLSKEPGDQRPLGTYPDEHFTEEAPRRSIATFQSRLAQISRGIQERNRGLVLPYTYLDPPLIENSVSI

SEQ ID NO: 135 - DNA, 3742 bp, Homo sapiens
gaattccttctctcctcctcctcgcccttctcctcgccctcctcctcctcctcgccctcccctcccgatcctcatccccttgccctcccccagcccagggacttttccggaaagtttttattttccgtctgggctctcggagaaagaagctcctggctcagcggctgcaaaactttcctgctgccgcgccgccagcccccgccctccgctgcccggccctgcgccccgccgagcgatgagcgcccctccggtcctgcggccgcccagtccgctgctgcccgtggcggcggcagctgccgcagcggccgccgcactggtcccagggtccgggcccgggcccgcgccgttcttggctcctgtcgcggccccggtcgggggcatctcgttccatctgcagatcggcctgagccgtgagccggtgctgctgctgcaggactcgtccggggactacagcctggcgcacgtccgcgagatggcttgctccattgtcgaccagaagttccctgaatgtggtttctacggaatgtatgataagatcctgctttttcgccatgaccctacctctgaaaacatccttcagctggtgaaagcggccagtgatatccaggaaggcgatcttattgaagtggtcttgtcacgttccgccacctttgaagactttcagattcgtccccacgctctctttgttcattcatacagagctccagctttctgtgatcactgtggagaaatgctgtgggggctggtacgtcaaggtcttaaatgtgaagggtgtggtctgaattaccataagagatgtgcatttaaaatacccaacaattgcagcggtgtgaggcggagaaggctctcaaacgtttccctcactggggtcagcaccatccgcacatcatctgctgaactctctacaagtgcccctgatgagccccttctgcaaaaatcaccatcagagtcgtttattggtcgagagaagaggtcaaattctcaatcatacattggacgaccaattcaccttgacaagattttgatgtctaaagttaaagtgccgcacacatttgtcatccactcctacacccggcccacagtgtgccagtactgcaagaagcttctgaaggggcttttcaggcagggcttgcagtgcaaagattgcagattcaactgccataaacgttgtgcaccgaaagtaccaaacaactgccttggcgaagtgaccattaatggagatttgcttagccctggggcagagtctgatgtggtcatggaagaagggagtgatgacaatgatagtgaaaggaacagtgggctcatggatgatatggaagaagcaatggtccaagatgcagagatggcaatggcagagtgccagaacgacagtggcgagatgcaagatccagacccagaccacgaggacgccaacagaaccatcagtccatcaacaagcaacaatatcccactcatgagggtagtgcagtctgtcaaacacacgaagaggaaaagcagcacagtcatgaaagaaggatggatggtccactacaccagcaaggacacgctgcggaaacggcactattggagattggatagcaaatgtattaccctctttcagaatgacacaggaagcaggtactacaaggaaattcctttatctgaaattttgtctctggaaccagtaaaaacttcagctttaattcctaatggggccaatcctcattgtttcgaaatcactacggcaaatgtagtgtattatgtgggagaaaatgtggtcaatccttccagcccatcaccaaataacagtgttctcaccagtggcgttggtgcagatgtggccaggatgtgggagatagccatccagcatgcccttatgcccgtcattcccaagggctcctccgtgggtacaggaaccaacttgcacagagatatctctgtgagtatttcagtatcaaattgccagattcaagaaaatgtggacatcagcacagtatatcagatttttcctgatgaagtactgggttctggacagtttggaattgtttatggaggaaaacatcgtaaaacaggaagagatgtagctattaaaatcattgacaaattacgatttccaacaaaacaagaaagccagcttcgtaatgaggttgcaattctacagaaccttcatcaccctggtgttgtaaatttggagtgtatgtttgagacgcctgaaagagtgtttgttgttatggaaaaactccatggagacatgctggaaatgatcttgtcaagtgaaaagggcaggttgccagagcacataacgaagtttttaattactcagatactcgtggctttgcggcaccttcattttaaaaatatcgttcactgtgacctcaaaccagaaaatgtgttgctagcctcagctgatccttttcctcaggtgaaactttgtgattttggttttgcccggatcattggagagaagtctttccggaggtcagtggtgggtacccccgcttacctggctcctgaggtcctaaggaacaagggctacaatcgctctctagacatgtggtctgttggggtcatcatctatgtaagcctaagcggcacattcccatttaatgaagatgaagacatacacgaccaaattcagaatgcagctttcatgtatccaccaaatccctggaaggaaatatctcatgaagccattgatcttatcaacaatttgctgcaagtaaaaatgagaaagcgctacagtgtggataagaccttgagccacccttggctacaggactatcagacctggttagatttgcgagagctggaatgcaaaatcggggagcgctacatcacccatgaaagtgatgacctgaggtgggagaagtatgcaggcgagcagcggctgcagtaccccacacacctgatcaatccaagtgctagccacagtgacactcctgagactgaagaaacagaaatgaaagccctcggtgagcgtgtcagcatcctctgagttccatctcctataatctgtcaaaacactgtggaactaataaatacatacggtcaggtttaacatttgccttgcagaactgccattattttctgtcagatgagaacaaagctgttaaactgttagcactgttgatgtatctgagttgccaagacaaatcaacagaagcatttgtattttgtgtgaccaactgtgttgtattaacaaaagttccctgaaacacgaaacttgttattgtgaatgattcatgttatatttaatgcattaaacctgtctccactgtgcctttgcaaatcagtgtttttcttactggagcttcattttggtaagagacagaatgtatctgtgaagtagttctgtttggtgtgtcccattggtgttgtcattgtaaacaaactcttgaagagtcgattatttccagtgttctatgaacaactccaaaacccatgtgggaaaaaaatgaatgaggagggtagggaataaaatcctaagacacaaatgcatgaacaagttttaatgtatagttttgaatcctttgcctgcctggtgtgcctcagtatatttaaactcaagacaatgcacctagctgtgcaagacctagtgctcttaagcctaaatgccttagaaatgtaaactgccatatataacagatacatttccctctttcttataatactctgttgtactatggaaaatcagctgctcagcaacctttcacctttgtgtatttttcaataataaaaaatattcttgtcaaaaaaaaaaaaa

SEQ ID NO: 136 - protein, 912 aa, Homo sapiens
MSAPPVLRPPSPLLPVAAAAAAAAAALVPGSGPGPAPFLAPVAAPVGGISFHLQIGLSREPVLLLQDSSGDYSLAHVREMACSIVDQKFPECGFYGMYDKILLFRHDPTSENILQLVKAASDIQEGDLIEVVLSRSATFEDFQIRPHALFVHSYRAPAFCDHCGEMLWGLVRQGLKCEGCGLNYHKRCAFKIPNNCSGVRRRRLSNVSLTGVSTIRTSSAELSTSAPDEPLLQKSPSESFIGREKRSNSQSYIGRPIHLDKILMSKVKVPHTFVIHSYTRPTVCQYCKKLLKGLFRQGLQCKDCRFNCHKRCAPKVPNNCLGEVTINGDLLSPGAESDVVMEEGSDDNDSERNSGLMDDMEEAMVQDAEMAMAECQNDSGEMQDPDPDHEDANRTISPSTSNNIPLMRVVQSVKHTKRKSSTVMKEGWMVHYTSKDTLRKRHYWRLDSKCITLFQNDTGSRYYKEIPLSEILSLEPVKTSALIPNGANPHCFEITTANVVYYVGENVVNPSSPSPNNSVLTSGVGADVARMWEIAIQHALMPVIPKGSSVGTGTNLHRDISVSISVSNCQIQENVDISTVYQIFPDEVLGSGQFGIVYGGKHRKTGRDVAIKIIDKLRFPTKQESQLRNEVAILQNLHHPGVVNLECMFETPERVFVVMEKLHGDMLEMILSSEKGRLPEHITKFLITQILVALRHLHFKNIVHCDLKPENVLLASADPFPQVKLCDFGFARIIGEKSFRRSVVGTPAYLAPEVLRNKGYNRSLDMWSVGVIIYVSLSGTFPFNEDEDIHDQIQNAAFMYPPNPWKEISHEAIDLINNLLQVKMRKRYSVDKTLSHPWLQDYQTWLDLRELECKIGERYITHESDDLRWEKYAGEQRLQYPTHLINPSASHSDTPETEETEMKALGERVSIL

SEQ ID NO: 137 - DNA, 3903 bp, Homo sapiens
aatggtcagtcaatacattataacataatacaccaaatgctagaatagaaggggaggggggcacacataatgactcactgctggaagaagggtgcatcagtgaattaaaaaatgtccctcccctcttcagcactcagcgcgcagctatttccttctgccagtctctttgaactctggatctttgcttttgctcgctgctctcctgtttttcattctccacattttctcaatcctctttctttatccttagccaccctgcttttttcctccttttttaaaaaatcggagatttcgtcttaaaatgatttgtcttccttaccttcgtccatttcaacactgaaggctgcaaagaacttcacctttcccctagtggtatttaaaaattctcaatccgtaaaaagtctttttgaaaggcaaaggaacaggacccagaccctctcgacacccttgatccgagtcagatctgcactagcaaccagaactaatatttcatttaacccaccaaaagggggaggcgagaggagccagaagcaaacttcatctgtctcagacggatccgtggttcctacatttggaggagccgcgtgtcagaaggcgtaggaccccaaggggggacaaggaggactcccgagtctcccttctccgctctccgagaccgaagaggtggactgagccgctcgggacagcggcaccggaggaggctcggagaagatgcggggctcggggccccggggtgcgggacaccggcggcccccaagcggcggcggcgacacccccatcaccccagcgtccctggccggctgctactctgcacctcgacgggctcccctctggacgtgccttctcctgtgcgccgcactccggaccctcctggccagccccagcaacgaagtgaatttattggattcacgcactgtcatgggggacctgggatggattgcttttccaaaaaatgggtgggaagagattggtgaagtggatgaaaattatgcccctatccacacataccaagtatgcaaagtgatggaacagaatcagaataactggcttttgaccagttggatctccaatgaaggtgcttccagaatcttcatagaactcaaatttaccctgcgggactgcaacagccttcctggaggactggggacctgtaaggaaacctttaatatgtattactttgagtcagatgatcagaatgggagaaacatcaaggaaaaccaatacatcaaaattgataccattgctgccgatgaaagctttacagaacttgatcttggtgaccgtgttatgaaactgaatacagaggtcagagatgtaggacctctaagcaaaaagggattttatcttgcttttcaagatgttggtgcttgcattgctctggtttctgtgcgtgtatactataaaaaatgcccttctgtggtacgacacttggctgtcttccctgacaccatcactggagctgattcttcccaattgctcgaagtgtcaggctcctgtgtcaaccattctgtgaccgatgaacctcccaaaatgcactgcagcgccgaaggggagtggctggtgcccatcgggaaatgcatgtgcaaggcaggatatgaagagaaaaatggcacctgtcaagtgtgcagacctgggttcttcaaagcctcacctcacatccagagctgcggcaaatgtccacctcacagttatacccatgaggaagcttcaacctcttgtgtctgtgaaaaggattatttcaggagagagtctgatccacccacaatggcatgcacaagacccccctctgctcctcggaatgccatctcaaatgttaatgaaactagtgtctttctggaatggattccgcctgctgacactggtggaaggaaagacgtgtcatattatattgcatgcaagaagtgcaactcccatgcaggtgtgtgtgaggagtgtggcggtcatgtcaggtaccttccccggcaaagcggcctgaaaaacacctctgtcatgatggtggatctactcgctcacacaaactatacctttgagattgaggcagtgaatggagtgtccgacttgagcccaggagcccggcagtatgtgtctgtaaatgtaaccacaaatcaagcagctccatctccagtcaccaatgtgaaaaaagggaaaattgcaaaaaacagcatctctttgtcttggcaagaaccagatcgtcccaatggaatcatcctagagtatgaaatcaagcattttgaaaaggaccaagagaccagctacacgattatcaaatctaaagagacaactattactgcagagggcttgaaaccagcttcagtttatgtcttccaaattcgagcacgtacagcagcaggctatggtgtcttcagtcgaagatttgagtttgaaaccaccccagtgtttgcagcatccagcgatcaaagccagattcctgtaattgctgtgtctgtgacagtaggagtcattttgttggcagtggttatcggcgtcctcctcagtggaagttgctgcgaatgtggctgtgggagggcttcttccctgtgcgctgttgcccatccaatcctaatatggcggtgtggctacagcaaagcaaaacaagatccagaagaggaaaagatgcattttcataatgggcacattaaactgccaggagtaagaacttacattgatccacatacctatgaggatcccaatcaagctgtccacgaatttgccaaggagatagaagcatcatgtatcaccattgagagagttattggagcaggtgaatttggtgaagtttgtagtggacgtttgaaactaccaggaaaaagagaattacctgtggctatcaaaacccttaaagtaggctatactgaaaagcaacgcagagatttcctaggtgaagcaagtatcatgggacagtttgatcatcctaacatcatccatttagaaggtgtggtgaccaaaagtaaaccagtgatgatcgtgacagagtatatggagaatggctctttagatacatttttgaagaaaaacgatgggcagttcactgtgattcagcttgttggcatgctgagaggtatctctgcaggaatgaagtacctttctgacatgggctatgtgcatagagatcttgctgccagaaacatcttaatcaacagtaaccttgtgtgcaaagtgtctgactttggactttcccgggtactggaagatgatcccgaggcagcctacaccacaaggggaggaaaaattccaatcagatggactgccccagaagcaatagctttccgaaagtttacttctgccagtgatgtctggagttatggaatagtaatgtgggaagttgtgtcttatggagagagaccctactgggagatgaccaatcaagatgtgattaaagcggtagaggaaggctatcgtctgccaagccccatggattgtcctgctgctctctatcagttaatgctggattgctggcagaaagagcgaaatagcaggcccaagtttgatgaaatagtcaacatgttggacaagctgatacgtaacccaagtagtctgaagacgctggttaatgcatcctgcagagtatctaatttattggcagaacatagcccactaggatctggggcctacagatcagtaggtgaatggctagaggcaatcaagatgggccggtatacagagattttcatggaaaatggatacagttcaatggacgctgtggctcaggtgaccttggaggatttgagacggcttggagtgactcttgtcggtcaccagaagaagatcatgaacagccttcaagaaatgaaggtgcagctggtaaacggaatggtgccattgtaacttcatgtaaatgtcgcttcttcaagtgaatgattctgcactttgtaaacagcactgagatttattttaacaaaaaaa

SEQ ID NO: 138 - protein, 1037 aa, Homo sapiens
MRGSGPRGAGHRRPPSGGGDTPITPASLAGCYSAPRRAPLWTCLLLCAALRTLLASPSNEVNLLDSRTVMGDLGWIAFPKNGWEEIGEVDENYAPIHTYQVCKVMEQNQNNWLLTSWISNEGASRIFIELKFTLRDCNSLPGGLGTCKETFNMYYFESDDQNGRNIKENQYIKIDTIAADESFTELDLGDRVMKLNTEVRDVGPLSKKGFYLAFQDVGACIALVSVRVYYKKCPSVVRHLAVFPDTITGADSSQLLEVSGSCVNHSVTDEPPKMHCSAEGEWLVPIGKCMCKAGYEEKNGTCQVCRPGFFKASPHIQSCGKCPPHSYTHEEASTSCVCEKDYFRRESDPPTMACTRPPSAPRNAISNVNETSVFLEWIPPADTGGRKDVSYYIACKKCNSHAGVCEECGGHVRYLPRQSGLKNTSVMMVDLLAHTNYTFEIEAVNGVSDLSPGARQYVSVNVTTNQAAPSPVTNVKKGKIAKNSISLSWQEPDRPNGIILEYEIKHFEKDQETSYTIIKSKETTITAEGLKPASVYVFQIRARTAAGYGVFSRRFEFETTPVFAASSDQSQIPVIAVSVTVGVILLAVVIGVLLSGSCCECGCGRASSLCAVAHPILIWRCGYSKAKQDPEEEKMHFHNGHIKLPGVRTYIDPHTYEDPNQAVHEFAKEIEASCITIERVIGAGEFGEVCSGRLKLPGKRELPVAIKTLKVGYTEKQRRDFLGEASIMGQFDHPNIIHLEGVVTKSKPVMIVTEYMENGSLDTFLKKNDGQFTVIQLVGMLRGISAGMKYLSDMGYVHRDLAARNILINSNLVCKVSDFGLSRVLEDDPEAAYTTRGGKIPIRWTAPEAIAFRKFTSASDVWSYGIVMWEVVSYGERPYWEMTNQDVIKAVEEGYRLPSPMDCPAALYQLMLDCWQKERNSRPKFDEIVNMLDKLIRNPSSLKTLVNASCRVSNLLAEHSPLGSGAYRSVGEWLEAIKMGRYTEIFMENGYSSMDAVAQVTLEDLRRLGVTLVGHQKKIMNSLQEMKVQLVNGMVPL

SEQ ID NO: 139 - DNA, 1282 bp, Homo sapiens
ctgcgatcccgcagggcagcgacgcgactctggtgcgggccgtcttcttccccccgagctgggcgtgcgcggccgcaatgaactgggagctgctgctgtggctgctggtgctgtgcgcgctgctcctgctcttggtgcagctgctgcgcttcctgagggctgacggcgacctgacgctactatgggccgagtggcagggacgacgcccagaatgggagctgactgatatggtggtgtgggtgactggagcctcgagtggaattggtgaggagctggcttaccagttgtctaaactaggagtttctcttgtgctgtcagccagaagagtgcatgagctggaaagggtgaaaagaagatgcctagagaatggcaatttaaaagaaaaagatatacttgttttgccccttgacctgaccgacactggttcccatgaagcggctaccaaagctgttctccaggagtttggtagaatcgacattctggtcaacaatggtggaatgtcccagcgttctctgtgcatggataccagcttggatgtctacagaaagctaatagagcttaactacttagggacggtgtccttgacaaaatgtgttctgcctcacatgatcgagaggaagcaaggaaagattgttactgtgaatagcatcctgggtatcatatctgtacctctttccattggatactgtgctagcaagcatgctctccggggtttttttaatggccttcgaacagaacttgccacatacccaggtataatagtttctaacatttgcccaggacctgtgcaatcaaatattgtggagaattccctagctggagaagtcacaaagactataggcaataatggagaccagtcccacaagatgacaaccagtcgttgtgtgcggctgatgttaatcagcatggccaatgatttgaaagaagtttggatctcagaacaacctttcttgttagtaacatatttgtggcaatacatgccaacctgggcctggtggataaccaacaagatggggaagaaaaggattgagaactttaagagtggtgtggatgcagactcttcttattttaaaatctttaagacaaaacatgactgaaaagagcacctgtacttttcaagccactggagggagaaatggaaaacatgaaaacagcaatcttcttatgcttctgaataatcaaagactaatttgtgattttactttttaatagatatgactttgcttccaacatggaatgaaataaaaaataaataataaaagattgccatgaatcttgcaaa

SEQ ID NO: 140 - protein, 339 aa, Homo sapiens; identical to SEQ ID NO: 32

SEQ ID NO: 141 - DNA, 1740 bp, Homo sapiens
atgagcagctgcaggtacaacgggggcgtcatgcggccgctcagcaacttgagcgcgtcccgccggaacctgcacgagatggactcagaggcgcagcccctgcagccccccgcgtctgtcggaggaggtggcggcgcgtcctccccgtctgcagccgctgccgccgccgccgctgtttcgtcctcagcccccgagatcgtggtgtctaagcccgagcacaacaactccaacaacctggcgctctatggaaccggcggcggaggcagcactggaggaggcggcggcggtggcgggagcgggcacggcagcagcagtggcaccaagtccagcaaaaagaaaaaccagaacatcggctacaagctgggccaccggcgcgccctgttcgaaaagcgcaagcggctcagcgactacgcgctcatcttcggcatgttcggcatcgtggtcatggtcatcgagaccgagctgtcgtggggcgcctacgacaaggcgtcgctgtattccttagctctgaaatgccttatcagtctctccacgatcatcctgctcggtctgatcatcgtgtaccacgccagggaaatacagttgttcatggtggacaatggagcagatgactggagaatagccatgacttatgagcgtattttcttcatctgcttggaaatactggtgtgtgctattcatcccatacctgggaattatacattcacatggacggcccggcttgccttctcctatgccccatccacaaccaccgctgatgtggatattattttatctataccaatgttcttaagactctatctgattgccagagtcatgcttttacatagcaaacttttcactgatgcctcctctagaagcattggagcacttaataagataaacttcaatacacgttttgttatgaagactttaatgactatatgcccaggaactgtactcttggtttttagtatctcattatggataattgccgcatggactgtccgagcttgtgaaaggtaccatgatcaacaggatgttactagcaacttccttggagcgatgtggttgatatcaataacttttctctccattggttatggtgacatggtacctaacacatactgtggaaaaggagtctgcttacttactggaattatgggtgctggttgcacagccctggtggtagctgtagtggcaaggaagctagaacttaccaaagcagaaaaacacgtgcacaatttcatgatggatactcagctgactaaaagagtaaaaaatgcagctgccaatgtactcagggaaacatggctaatttacaaaaatacaaagctagtgaaaaagatagatcatgcaaaagtaagaaaacatcaacgaaaattcctgcaagctattcatcaattaagaagtgtaaaaatggagcagaggaaactgaatgaccaagcaaacactttggtggacttggcaaagacccagaacatcatgtatgatatgatttctgacttaaacgaaaggagtgaagacttcgagaagaggattgttaccctggaaacaaaactagagactttgattggtagcatccacgccctccctgggctcataagccagaccatcaggcagcagcagagagatttcattgaggctcagatggagagctacgacaagcacgtcacttacaatgctgagcggtcccggtcctcgtccaggaggcggcggtcctcttccacagcaccaccaacttcatcagagagtagctag

SEQ ID NO: 142 - protein, 579 aa, Homo sapiens
MSSCRYNGGVMRPLSNLSASRRNLHEMDSEAQPLQPPASVGGGGGASSPSAAAAAAAAVSSSAPEIVVSKPEHNNSNNLALYGTGGGGSTGGGGGGGGSGHGSSSGTKSSKKKNQNIGYKLGHRRALFEKRKRLSDYALIFGMFGIVVMVIETELSWGAYDKASLYSLALKCLISLSTIILLGLIIVYHAREIQLFMVDNGADDWRIAMTYERIFFICLEILVCAIHPIPGNYTFTWTARLAFSYAPSTTTADVDIILSIPMFLRLYLIARVMLLHSKLFTDASSRSIGALNKINFNTRFVMKTLMTICPGTVLLVFSISLWIIAAWTVRACERYHDQQDVTSNFLGAMWLISITFLSIGYGDMVPNTYCGKGVCLLTGIMGAGCTALVVAVVARKLELTKAEKHVHNFMMDTQLTKRVKNAAANVLRETWLIYKNTKLVKKIDHAKVRKHQRKFLQAIHQLRSVKMEQRKLNDQANTLVDLAKTQNIMYDMISDLNERSEDFEKRIVTLETKLETLIGSIHALPGLISQTIRQQQRDFIEAQMESYDKHVTYNAERSRSSSRRRRSSSTAPPTSSESS

SEQ ID NO: 143 - DNA, 1896 bp, Homo sapiens
atgcgcgccgtgccgctgcccgccccgctcctgccgctgctgctgctcgcgctcctggccgctcccgccgcccgcgccagcagagccgagtccgtctccgcgccgtggcccgaacccgagcgcgagtcgcggccaccgcccggcccggggcccgggaacaccacccggtttgggtctggggcggcgggcggcagcggcagctccagctccaacagcagtggcgacgccttggtgacccgcatttccatcctcctccgcgacctacccaccctcaaggcagccgtgatcgtggcgttcgcctttaccaccctcctcatcgcctgcctgctgctgcgcgtcttcaggtcgggaaagaggttaaagaagacacgcaagtatgatatcatcaccactccagcagagcgagtggaaatggcgccactaaatgaagaggatgatgaagatgaggactccacagtattcgacatcaaatacagagtgtccttgccggctgcactgagacgtcagctgccagggtgccagacgctactgacagttcctgtgcccccacccttcatcctcgacattgaccttccagcaagatgcagtggaaggcctgatggtggaatcagacctggtaaaacctgtttcccagcctggtggcatcctgtggaaagttggtcagctgcaacctggggtgtgaaggactggacctggaagccctcttgcgtcggaggtgttgaaaccaaaacgaacgttatgtataaaaccccagctccatcgtgcgtgtcaggcatctgctcagactgtcactggcaagctcgtttccacgtcaccacaatggagttgcttctgccaccctttgggcatccctttaaagtgccccctacttctactccccatggttttcgacaactgcagctgaatctcatggaaaagctggattcctctgccttacgcagaaacacccgggctccatctgccaggtgcttgccactggtcctggcagaaatggcggctgctgaaagtgaccttccaaatccttggtggcacttcagcgccacaggctctccaataaaaaccctttacacacaaaccatgagtaccttgggcttggatgttttctgtggtgccggccagcggggcaccttttgtgaagacagagcagtgactaaggttctccagggtagctctttctccaaacagctgcgctggaagccagccctagagagtgggtttccccatcatctcaggcttctcagagagtgtcctccgctgagcacccatcctgtcaggttggctcgttcagatgcccggggacaagccagcctgacggggaggagggtgtttcggcgtccgcggcagtctctgcatggcggagggtcagcgggtaccgcaacttgccttttggttttgaagattctgttgaggcgccatcctcaccttgacctcttctacaaaatctgtctcccctgctgtgccgtggaacacctacgggaagccaagagaagctcagtgactgtccttgcgtcatttgagcagagcccacaaaaggcagctgctgcccacggggagcctgtcaaacgagggcccagtgggcaattgaccagacacacatgccctggctgggggatcacacatgcgaacctgcagacaattccagatacccaaggccaggaaggcccacgtgaggatgtcactcaccctggaggagacttggatggggtggcaaatttctatttggaggaagagggtttccaggatggcagatgccagaagatggtcctgatgtctgaggaagggccacctagtttgacaggatgtgagaggctcacaggttcccatcacttctccagccattccaagtcttggtccttcctttccccccgacagcccctgtttctgtccaggccctga

SEQ ID NO: 144 - protein, 631 aa, Homo sapiens [sequence omitted]

SEQ ID NO: 145 - DNA, 5131 bp, Homo sapiens
ggctgggctgcgaatagcgtgttcctctccggcggaacacacacacccggccttggggctgtctcctgaagctccctcctccacggagagcgctgagcgccgccgggaattccatcccaccgtgggcacgcagtctttggaggtcccgggcgcagcacgctcggtgtccccacactgcagcaagacagagaccccgcgggaaccttgagcttggaacaacccttgagcctctgcagtcggaagagtgggcgcagcagcccagcggaggccaggcgcgcaacctcgggcgccggggcaaggagagagtgcagggaggcgcagctcaggcgcccggctcaggagcgggaggaagttctcgcggcgccgggagcgcggtggacgcgccctgggcgcacgcccaggcagccttctccctggccctcgggactgtcctcgggcggcaaggaggagcttgctggagtcttagaggccatccagagccagcgagcaggagcgctgcgtctcccgcctcagctaggaagggggagtggcgctggcaggctggagctgggaacccagcgagcgcctgaccttcctcctcctcttcctgaccctcttcgcgtcttgggctccggaggaaggttctagcggctgcaggaggtccccagacccattttcctagaaggctggtgatggatctgctgctcctgccgccgccggggcacttggagcgcaccggcggcgcgtgagctgggctttgctctccaccgccctgggcaaaccccgggccagccccgcctggcacctttgcctgagtccctttcggttcccgacccaaagccaccagcgtccagggagggaggaggaggtggtcctcaggtgcagccccgccgagatgtccgcgcagagcctgctccacagcgtcttctcctgttcctcgcccgcttcaagtagcgcggcctcggccaagggcttctccaagaggaagctgcgccagacccgcagcctggacccggccctgatcggcggctgcgggagcgacgaggcgggcgcggagggcagtgcgcggggagccacggcgggccgcctctactccccatcactcccagccgagagtctcggccctcgcttggcgtcctcttcccggggtccgccccccagggccaccaggctaccgcctcctggacctctttgctcgtccttctccacacccagcaccccgcaggagaagtcaccatccggcagctttcactttgactatgaggttcccctgggtcgcggcggcctcaagaagagcatggcctgggacctgccttctgtcctggccgggccagccagtagccgaagcgcttccagcatcctctgttcatccgggggaggccccaatggcatcttcgcttctcctaggaggtggctccagcagaggaagttccagtccccacccgacagtcgcgggcacccctacgtcgtgtggaaatccgagggtgatttcacctggaacagcatgtcaggccgcagtgtgcggctgaggtcagtccccatccagagtctctcagagctggagagggcccggctgcaggaagtgcctttttatcagttgcaacaggactgtgacctgagctgtcagatcaccattcccaaagatggacaaaagagaaagaaatctttaagaaagaaactggattcactaggaaaggagaaaaacaaagacaaagaattcatcccacaggcatttggaatgcccttatcccaagtcattgcgaatgacagggcctataaactcaagcaggacttgcagagggacgagcagaaagatgcatctgactttgtggcttccctcctcccatttggaaataaaagacaaaacaaagaactctcaagcagtaactcatctctcagctcaacctcagaaacaccgaatgagtcaacgtccccaaacaccccggaaccggctcctcgggctaggaggaggggtgccatgtcagtggattctatcaccgatcttgatgacaatcagtctcgactactagaagctttacaactttccttgcctgctgaggctcaaagtaaaaaggaaaaagccagagataagaaactcagtctgaatcctatttacagacaggtccctaggctggtggacagctgctgtcagcacctagaaaaacatggcctccagacagtggggatattccgagttggaagctcaaaaaagagagtgagacaattacgtgaggaatttgaccgtgggattgatgtctctctggaggaggagcacagtgttcatgatgtggcagccttgctgaaagagttcctgagggacatgccagacccccttctcaccagggagctgtacacagctttcatcaacactctcttgttggagccggaggaacagctgggcaccttgcagctcctcatataccttctacctccctgcaactgcgacaccctccaccgcctgctacagttcctctccatcgtggccaggcatgccgatgacaacatcagcaaagatgggcaagaggtcactgggaataaaatgacatctctaaacttagccaccatatttggacccaacctgctgcacaagcagaagtcatcagacaaagaattctcagttcagagttcagcccgggctgaggagagcacggccatcatcgctgttgtgcaaaagatgattgaaaattatgaagccctgttcatggttcccccagatctccagaacgaagtgctgatcagcctgttagagaccgatcctgatgtcgtggactatttactcagaagaaaggcttcccaatcatcaagccctgacatgctgcagtcggaagtttccttttccgtgggagggaggcattcatctacagactccaacaaggcctccagcggagacatctccccttatgacaacaactccccagtgctgtctgagcgctccctgctggctatgcaagaggacgcggccccggggggctcggagaagctttacagagtgccagggcagtttatgctggtgggccacttgtcgtcgtcaaagtcaagggaaagttctcctggaccaaggcttgggaaagatctgtcagaggagcctttcgatatctggggaacttggcattcaacattaaaaagcggatccaaagacccaggaatgacaggttcctctggagacatttttgaaagcagctccctaagagcggggccctgctccctttctcaagggaacctgtccccaaattggcctcggtggcaggggagccccgcagagctggacagcgacacgcagggggctcggaggactcaggccgcagcccccgcgacggagggcagggcccaccctgcggtgtcgcgcgcctgcagcacgccccacgtccaggtggcagggaaagccgagcggcccacggccaggtcggagcagtacttgaccctgagcggcgcccacgacctcagcgagagtgagctggatgtggccgggctgcagagccgggccacacctcagtgccaaagaccccatgggagtgggagggatgacaagcggcccccgcctccatacccgggcccagggaagcccgcggcagcggcagcctggatccaggggcccccggaaggcgtggagacacccacggaccagggaggccaagcagccgagcgagagcagcaggtcacgcagaaaaaactgagcagcgccaactccctgccagcgggcgagcaggacagtccgcgcctgggggacgctggctggctcgactggcagagagagcgctggcagatctgggagctcctgtcgaccgacaaccccgatgccctgcccgagacgctggtctgagcccgcacccagccgagccccccctgccccgagccccccgccctccagcccaggggggaccgtgggtggtggccactggcacacttagtgttcttctttcacacttctcaaaagtgacacaagagaaatccagttcacctacagaggtagagcactcacgcccccgccattgagaataaggttccattgcgtagccagccttaggaaaaacaaacagaacccaaaccagatggcaatgtcatctaaaaacgtccctcttggctctataatataagatacaactcttgcttggtatagcctaaccgtatttatgtgtcttcggttttgactattgtgtattctgtaacagattatgtataatcatatatgatatattcacaaagagaaaacaaaaggaacttttaaaaaaaaaatcacttcacttatattaagcaatgagatatactaaacaatgagattctatagaatgttctagaatgtgcacaagcgggtttctgtgcttttgccatagctttataactggggataacccttccttcgataccaaacactaacaagaggaagcagaatatgagaagccatatttttacataggagtcagatacaaaaagaaaaatcactgaatgcttttagatattgaatacgttttcaggaaaatgctaaatctgatagattacgaaatatatttttagaacttgtttagaaaggattcagttaaccaaacaagaaaaaggcagtgcctcacaaagaaattaagaagttgtccgtcccacgttacatcaaattcagttttatataggccatatataatatatatttataatgtataatttttatgtatttttcaaaactacaaactggaatccaactataaagtgtttaagaatctacacagaatattcaaattatagaacatgttttttccctttgccccataatcagtatttgccaaattacatgcaattccttaaaaactaaatcacattggtaaaaggcctacagctttgtacttacattgtgccaaaggctgaggaaatgttttctttcgaatttttatgtgtattgtaaaatgttctaccgtactttagtagtttgaagttttcaagtgcataactatttttgaccagcagaaggcgatacgcttcagtattttatgcaattttttttcacttcgaagggaaagtgtattataaaaaaagattttttttttttaaaacatgctactcttaattttcatgttggtgatgaaattcccagtggtgtttcttaaggttctatcttgtgccatgatgaataaaaagttaagcaaaaaaaaaaaaaaaaaaaaaaaaa

SEQ ID NO: 146 - protein, 974 aa, Homo sapiens
MSAQSLLHSVFSCSSPASSSAASAKGFSKRKLRQTRSLDPALIGGCGSDEAGAEGSARGATAGRLYSPSLPAESLGPRLASSSRGPPPRATRLPPPGPLCSSFSTPSTPQEKSPSGSFHFDYEVPLGRGGLKKSMAWDLPSVLAGPASSRSASSILCSSGGGPNGIFASPRRWLQQRKFQSPPDSRGHPYVVWKSEGDFTWNSMSGRSVRLRSVPIQSLSELERARLQEVPFYQLQQDCDLSCQITIPKDGQKRKKSLRKKLDSLGKEKNKDKEFIPQAFGMPLSQVIANDRAYKLKQDLQRDEQKDASDFVASLLPFGNKRQNKELSSSNSSLSSTSETPNESTSPNTPEPAPRARRRGAMSVDSITDLDDNQSRLLEALQLSLPAEAQSKKEKARDKKLSLNPIYRQVPRLVDSCCQHLEKHGLQTVGIFRVGSSKKRVRQLREEFDRGIDVSLEEEHSVHDVAALLKEFLRDMPDPLLTRELYTAFINTLLLEPEEQLGTLQLLIYLLPPCNCDTLHRLLQFLSIVARHADDNISKDGQEVTGNKMTSLNLATIFGPNLLHKQKSSDKEFSVQSSARAEESTAIIAVVQKMIENYEALFMVPPDLQNEVLISLLETDPDVVDYLLRRKASQSSSPDMLQSEVSFSVGGRHSSTDSNKASSGDISPYDNNSPVLSERSLLAMQEDAAPGGSEKLYRVPGQFMLVGHLSSSKSRESSPGPRLGKDLSEEPFDIWGTWHSTLKSGSKDPGMTGSSGDIFESSSLRAGPCSLSQGNLSPNWPRWQGSPAELDSDTQGARRTQAAAPATEGRAHPAVSRACSTPHVQVAGKAERPTARSEQYLTLSGAHDLSESELDVAGLQSRATPQCQRPHGSGRDDKRPPPPYPGPGKPAAAAAWIQGPPEGVETPTDQGGQAAEREQQVTQKKLSSANSLPAGEQDSPRLGDAGWLDWQRERWQIWELLSTDNPDALPETLV

SEQ ID NO: 147 - DNA, 2397 bp, Homo sapiens
cccccgagccgcgccgagtctgccgccgccgcagcgcctccgctccgccaactccgccggcttaaattggactcctagatccgcgagggcgcggcgcagccgagcagcggctctttcagcattggcaaccccaggggccaatatttcccacttagccacagctccagcatcctctctgtgggctgttcaccaactgtacaaccaccatttcactgtggacattactccctcttacagatatgggagacatgggagatccaccaaaaaaaaaacgtctgatttccctatgtgttggttgcggcaatcagattcacgatcagtatattctgagggtttctccggatttggaatggcatgcggcatgtttgaaatgtgcggagtgtaatcagtatttggacgagagctgtacatgctttgttagggatgggaaaacctactgtaaaagagattatatcaggttgtacgggatcaaatgcgccaagtgcagcatcggcttcagcaagaacgacttcgtgatgcgtgcccgctccaaggtgtatcacatcgagtgtttccgctgtgtggcctgcagccgccagctcatccctggggacgaatttgcgcttcgggaggacggtctcttctgccgagcagaccacgatgtggtggagagggccagtctaggcgctggcgacccgctcagtcccctgcatccagcgcggccactgcaaatggcagcggagcccatctccgccaggcagccagccctgcggccccacgtccacaagcagccggagaagaccacccgcgtgcggactgtgctgaacgagaagcagctgcacaccttgcggacctgctacgccgcaaacccgcggccagatgcgctcatgaaggagcaactggtagagatgacgggcctcagtccccgtgtgatccgggtctggtttcaaaacaagcggtgcaaggacaagaagcgaagcatcatgatgaagcaactccagcagcagcagcccaatgacaaaactaatatccaggggatgacaggaactcccatggtggctgccagtccagagagacacgacggtggcttacaggctaacccagtggaagtacaaagttaccagccaccttggaaagtactgagcgacttcgccttgcagagtgacatagatcagcctgcttttcagcaactggtcaatttttcagaaggaggaccgggctctaattccactggcagtgaagtagcatcaatgtcctctcaacttccagatacacctaacagcatggtagccagtcctattgaggcatgaggaacattcattctgtattttttttccctgttggagaaagtgggaaattataatgtcgaactctgaaacaaaagtatttaacgacccagtcaatgaaaactgaatcaagaaatgaatgctccatgaaatgcacgaagtctgttttaatgacaaggtgatatggtagcaacactgtgaagacaatcatgggattttactagaattaaacaacaaacaaaacgcaaaacccagtatatgctattcaatgatcttagaagtactgaaaaaaaaagacgtttttaaaacgtagaggatttatattcaaggatctcaaagaaagcattttcatttcactgcacatctagagaaaaacaaaaatagaaaattttctagtccatcctaatctgaatggtgctgtttctatattggtcattgccttgccaaacaggagctccagcaaaagcgcaggaagagagactggcctccttggctgaaagagtcctttcaggaaggtggagctgcattggtttgatatgtttaaagttgactttaacaaggggttaattgaaatcctgggtctcttggcctgtcctgtagctggtttattttttactttgccccctccccactttttttgagatccatcctttatcaagaagtctgaagcgactataaaggtttttgaattcagatttaaaaaccaacttataaagcattgcaacaaggttacctctattttgccacaagcgtctcgggattgtgtttgacttgtgtctgtccaagaacttttcccccaaagatgtgtatagttattggttaaaatgactgttttctctctctatggaaataaaaaggaaaaaaaaaaggaaactttttttgtttgctcttgcattgcaaaaattataaagtaatttattatttattgtcggaagacttgccacttttcatgtcatttgacattttttgtttgctgaagtgaaaaaaaaagataaaggttgtacggtggtctttgaattatatgtctaattctatgtgttttgtctttttcttaaatattatgtgaaatcaaagcgccatatgtagaattatatcttcaggactatttcactaataaacatttggcatagat

SEQ ID NO: 148 - protein, 346 aa, Homo sapiens
MGDPPKKKRLISLCVGCGNQIHDQYILRVSPDLEWHAACLKCAECNQYLDESCTCFVRDGKTYCKRDYIRLYGIKCAKCSIGFSKNDFVMRARSKVYHIECFRCVACSRQLIPGDEFALREDGLFCRADHDVVERASLGAGDPLSPLHPARPLQMAAEPISARQPALRPHVHKQPEKTTRVRTVLNEKQLHTLRTCYAANPRPDALMKEQLVEMTGLSPRVIRVWFQNKRCKDKKRSIMMKQLQQQQPNDKTNIQGMTGTPMVAASPERHDGGLQANPVEVQSYQPPWKVLSDFALQSDIDQPAFQQLVNFSEGGPGSNSTGSEVASMSSQLPDTPNSMVASPIEA

SEQ ID NO: 149 - DNA, 1886 bp, Homo sapiens
gcggagctctgccttggagattctcagtgctgcggatcatgtccctaaggggcagcctctcgcgtctcctccagacgcgagtgcattccatcctgaagaaatccgtccactccgtggctgtgataggagccccgttctcacaagggcagaaaagaaaaggagtggagcatggtcccgctgccataagagaagctggcttgatgaaaaggctctccagtttgggctgccacctaaaagactttggagatttgagttttactccagtccccaaagatgatctctacaacaacctgatagtgaatccacgctcagtgggtcttgccaaccaggaactggctgaggtggttagcagagctgtgtcagatggctacagctgtgtcacactgggaggagaccacagcctggcaatcggtaccattagtggccatgcccgacactgcccagacctttgtgttgtctgggttgatgcccatgctgacatcaacacaccccttaccacttcatcaggaaatctccatggacagccagtttcatttctcctcagagaactacaggataaggtaccacaactcccaggattttcctggatcaaaccttgtatctcttctgcaagtattgtgtatattggtctgagagacgtggaccctcctgaacattttattttaaagaactatgatatccagtatttttccatgagagatattgatcgacttggtatccagaaggtcatggaacgaacatttgatctgctgattggcaagagacaaagaccaatccatttgagttttgatattgatgcatttgaccctacactggctccagccacaggaactcctgttgtcgggggactaacctatcgagaaggcatgtatattgctgaggaaatacacaatacagggttgctatcagcactggatcttgttgaagtcaatcctcagttggccacctcagaggaagaggcgaagactacagctaacctggcagtagatgtgattgcttcaagctttggtcagacaagagaaggagggcatattgtctatgaccaacttcctactcccagttcaccagatgaatcagaaaatcaagcacgtgtgagaatttaggagacactgtgcactgacatgtttcacaacaggcattccagaattatgaggcattgaggggatagatgaatactaaatggttgtctgggtcaatactgccttaatgagaacatttacacattctcacaattgtaaagtttcccctctattttggtgaccaatactactgtaaatgtatttggttttttgcagttcacagggtattaatatgctacagtactatgtaaatttaaagaagtcataaacagcatttattaccttggtatatcatactggtcttgttgctgttgttccttcacatttaagtggtttttcatctttcctccctcctcccacagcctggctatacagtgcatccttgaactgtcagcccacagcagcaatatgcttattctatccacatccctaacatcatgcattcacaaggtcaaagttctggtccacaaacccttccctatagaagttcaatggctgcgaaagaatttgtagtaaaccaggcctcccaggatggcgagctccagtaagatgataatggaaagcagcagcttgttggttgtcactctacaaagagaagcaaagtggggagtagtcagaagtttggataaccttccttctaaacatttgggggttagacctgggaccacggctggatactctgaggctgtatgtttgatcacacagccacttagcaggaagtactcataaggttctttagctgtcacttagggataacactgtctacctcacagaaatgttaaactgagacaataaaacccaaagcat

SEQ ID NO: 150 - protein, 354 aa, Homo sapiens
MSLRGSLSRLLQTRVHSILKKSVHSVAVIGAPFSQGQKRKGVEHGPAAIREAGLMKRLSSLGCHLKDFGDLSFTPVPKDDLYNNLIVNPRSVGLANQELAEVVSRAVSDGYSCVTLGGDHSLAIGTISGHARHCPDLCVVWVDAHADINTPLTTSSGNLHGQPVSFLLRELQDKVPQLPGFSWIKPCISSASIVYIGLRDVDPPEHFILKNYDIQYFSMRDIDRLGIQKVMERTFDLLIGKRQRPIHLSFDIDAFDPTLAPATGTPVVGGLTYREGMYIAEEIHNTGLLSALDLVEVNPQLATSEEEAKTTANLAVDVIASSFGQTREGGHIVYDQLPTPSSPDESENQARVRI

SEQ ID NO: 151 - DNA, 1554 bp, Homo sapiens
aattatatatttttactctatgtttctctacatgtttttttctttccgttgctggcggaagaggcacgtgcgctgctgaatggagctggtcgctggttgctacgagcaggtcctctttgggttcgctgtacacccggagcccaaggcttgcggcgaccacgagcaatggactcttgtggctgacttcactcaccatgctcacactgcctccttgtcagcagtagctgtaaatagtcgttttgtggtcactgggagcaaagatgaaacaattcacatttatgacatgaaaaagaagattgagcatggggctctagtgcatcacagtggtacaataacttgcctgaaattctatggcaacaggcatttaatcagtggagcggaagatggactcatctgtatctgggatgcaaagaaatgggaatgcctgaagtcaattaaagctcacaaaggacaggtgaccttcctttctattcacccatctggcaagttggccctgtcggttggtacagataaaactttaagaacgtggaatcttgtagaaggaagatcagcattcataaaaaatataaaacaaaatgctcacatagtagaatggtccccaagaggagagcagtatgtagttatcatacagaataaaatagacatctatcagcttgacactgcatccattagtggcaccatcacaaatgaaaagagaatttcctctgttaaatttctttcagagtctgtccttgcagtggctggagatgaagaagttataaggttttttgactgtgattcactagtgtgcctctgcgaatttaaagctcatgaaaacagggtaaaggacatgttcagttttgaaattccagagcatcatgttattgtttcagcatcgagtgatggtttcatcaaaatgtggaagcttaagcaggataagaaagttcccccatctttactctgtgaaataaacactaatgccaggctgacgtgtcttggagtgtggctagacaaagtggcagacatgaaaagccttcctccagctgcagagccttctcctgtaagtaaagaacagtccaaaattggcaaaaaggagcctggtgacacagtgcacaaagaagaaaagcggtcaaaacctaacacaaagaaacgcggtttaacaggtgacagtaagaaagcaacaaaagaaagtggcctgatatcaaccaagaagaggaaaatggtagaaatgttggaaaagaagaggaaaaagaagaaaataaaaacaatgcagtgaatcacagatgtctcctgaaagaactcttttagatgaaatcattctactcaaatgtaccttaatttttttttttccctgagtaaaagcaagaaatttcttcctttggaaaaaatatatatattaaaaaaccacttttagatggttttttttaaaaaaaaaaaaaaaactggtaaaattacttttggcagacagtgttttatgaattatgtatcatgttgatatataatatgttaatgtgtcatgtaatttttactttgtacaaagcaaataaagatctttctcaaaaaaaaaaaaaaaaa

SEQ ID NO: 152 - protein, 391 aa, Homo sapiens
MELVAGCYEQVLFGFAVHPEPKACGDHEQWTLVADFTHHAHTASLSAVAVNSRFVVTGSKDETIHIYDMKKKIEHGALVHHSGTITCLKFYGNRHLISGAEDGLICIWDAKKWECLKSIKAHKGQVTFLSIHPSGKLALSVGTDKTLRTWNLVEGRSAFIKNIKQNAHIVEWSPRGEQYVVIIQNKIDIYQLDTASISGTITNEKRISSVKFLSESVLAVAGDEEVIRFFDCDSLVCLCEFKAHENRVKDMFSFEIPEHHVIVSASSDGFIKMWKLKQDKKVPPSLLCEINTNARLTCLGVWLDKVADMKSLPPAAEPSPVSKEQSKIGKKEPGDTVHKEEKRSKPNTKKRGLTGDSKKATKESGLISTKKRKMVEMLEKKRKKKKIKTMQ

SEQ ID NO: 153 - DNA, 5285 bp, Homo sapiens
gatgtcttggacatgctctggctggctaatctccatgttctagccgactgaaaatacggtggccaagtggatggtgtgcttatttgcagtctaaagaaatttccttttgatgtggcagaaaatcgaggatgtggagtggagaccccagacttacttggagctggagggtctgccttgcatcctgatcttcagtgggatggacccgcatggggagtccttgccgaggtctttgaggtactgtgacctgcgattgataaactcctcctgcttggtgagaacagccttggagcaggagctgggcctggctgcctactttgtgagcaacgaggttcccttggagaagggggctaggaacgaggccttggagagtgatgctgagaagctgagcagcacagacaacgaggatgaggagctggggacagaaggctctacctcggagaagagaagccccatgaaaagggagaggtcccgctcccacgactcagcatcctcatccctctcctccaaggcttccggttcagcgctcggtggcgagtcctcggctcagcccacagcactcccccagggagagcatgccaggtcgccccagccccgtggccccgcagaggagggcagagcccctggtgagaaacagaggccccgggcaagtcaggggccaccctcggccatcagcaggcacagtcccgggccgacgccccagcccgactgtagcctcaggaccggccagaggagcgtccaggtgtcggtcacctcgtcgtgctcccagctgtcctcctcctcgggctcatcctcctcatccgtggcgcccgctgccggcacgtgggtcctgcaggcctcccagtgctccttgaccaaggcctgccgccagccacccattgtcttcttgcccaagctcgtgtacgacatggttgtgtccactgacagcagtggcctgcccaaggccgcctccctcctgccctccccctcggtcatgtgggccagctctttccgccccctgctcagcaagaccatgacatccaccgagcagtccctctactaccggcagtggacggtgccccggcccagccacatggactacggcaaccgggccgagggccgcgtggacggcttccacccccgcaggctgctgctcagcggcccccctcagatcgggaagacaggtgcctacctgcagttcctcagtgtcctgtccaggatgcttgttcggctcacagaagtggatgtctatgacgaggaggagatcaatatcaacctcagagaagaatctgactggcattatctccagcttagcgacccctggccagacctggagctgttcaagaagttgccctttgactacatcattcacgacccgaagtatgaagatgccagcctgatttgttcgcactatcagggtataaagagtgaagacagagggatgtcccggaagccggaggacctttatgtgcggcgtcagacggcacggatgagactgtccaagtacgcagcgtacaacacttaccaccactgtgagcagtgccaccagtacatgggcttccacccccgctaccagctgtatgagtccaccctgcacgcctttgccttctcttactccatgctaggagaggagatccagctgcacttcatcatccccaagtccaaggagcaccactttgtcttcagccaacctggaggccagctggagagcatgcgactacccctcgtgacagacaagagccatgaatatataaaaagtccgacattcactccaaccaccggccgtcacgaacatgggctctttaatctgtaccacgcaatggacggtgccagccatttgcacgtgctggttgtcaaggaatacgagatggcaatttataagaaatattggcccaaccacatcatgctggtgctccccagtatcttcaacagtgctggagttggtgctgctcatttcctcatcaaggagctgtcctaccataacctggagctcgagcggaaccggcaggaggagctgggaatcaagccgcaggacatctggcctttcattgtgatctctgatgactcctgcgtgatgtggaacgtggtggatgtcaactctgctggggagagaagcagggagttctcctggtcggaaaggaacgtgtctttgaagcacatcatgcagcacatcgaggcggcccccgacatcatgcactacgccctgctgggcctgcggaagtggtccagcaagacccgggccagcgaggtgcaagagcccttctcccgctgccacgtgcacaacttcatcatcctgaacgtggacctgacccagaacgtgcagtacaaccagaaccggttcctgtgtgacgatgtagacttcaacctgcgggtgcacagcgccggcctcctgctctgccggttcaaccgcttcagcgtgatgaagaagcagatcgtggtgggcggccacaggtccttccacatcacatccaaggtgtctgataactctgccgcggtcgtgccggcccagtacatctgtgccccggacagcaagcacacgttcctcgcagcgcccgcccagctcctgctggagaagttcctgcagcaccacagccacctcttcttcccgctgtccctgaagaaccatgaccacccagtgctgtctgtcgactgttacctgaacctgggatctcagatttctgtttgctatgtgagctccaggccccactctttaaacatcagctgctcggacttgctgttcagtgggctgctgctgtacctctgtgactcttttgtgggagctagctttttgaaaaagtttcattttctgaaaggtgcgacgttgtgtgtcatctgtcaggaccggagctcactgcgccagacggtcgtccgcctggagctcgaggacgagtggcagttccggctgcgcgatgagttccagaccgccaatgccagggaagaccggccgctcttttttctgacgggacgacacatctgaggaagacagcggcgagttttctgaagagatgagtgctcagagccctcatgctgttgaggctaaagggaggcctggaacggtggggcgtttgactggaatggaccccagggactgtccaggtgcagcccctcctagtacacatgggcccccgaggccgtggtcctgggagccaggaagactccgcagtgggtgagaatgaaaacttgagactcccaagttctgggccagcccattgctctgggctgttttaaagcccatttcacgaggaacaaagatttacttcctgtcctgccattcgtgtgcttccatggacaaacctgatttttttctcttagttctaaagaatcttgggttattttgtagcggtgccagtatttcagtagatgggatttcagccaagtaggttcccctgtaacctcctacaaagcaatattccaaaggaacattttaactgtaaaggctggagacaagaaaaaataagtagatcgttttaataacaattatttaattgcctataagtttgctgtttcagaggctagcccaaaggcatcaaatttaataaagttaaacaaattgatttacttcagagcaaatatgatcctattaaaataatatagggtaaataccctacctcttagaaagggcaaaaatgcaaagaagctttctttaaaactaaaagggttttttggggggggagttggcggggaggaaataaggctaacagaggttgacctaaaattagccttacaaaggagaaaggaccacattgcttacttgaaacagacaatgaaaacaaccaaagtgatatataaaatagttgatgagaactagacttatgactgtagtttactagagtttagttttcagttgctgaagtagctcattttctcttactaatgtttggttcctcagggaagaatctcacttgactagagaggaggtgggaacagaagagagaaggaggcagggagatgtatttcttagggctcaccccttcacagactgacagaatggttttgttttgttttgttttgttttgttttgtttttgagatggactctagctctgtcacccaggctggagtgcagtggtgcgatctcggctcactgcaagctccgcctcccgggttctcaccattctcctgcctcagcctcccgagtagctgggactacaggcgcccaccaccacgcccggctaattttttgtattttttagtagagacggggtttcaccatgttagccaggatggtctcgatctcctgacctcgtgatccgcccgcctcggcctcccaaagtgctgggattacaggcgtgagccaccgtgcctgccccagaatggtttttaaagccacagttgagaggccacccattgcccggcgcctggacagtgatcatcttgttcatcttgttcagtcctttcttgtgtgattggaattattcatcccctttgaaagatgagaaggttgagatgcaaagagtctacctttccaagttctcactgctggaaagagctagaagcacagttcaaagttctggcttctggactctgcagtccaggtctcccttctcccacttgcctaccctcaatgccacactgtttttgaagtggcccataacttgaaggaaaagtttaaagacagttcaatttaatcatcagaatgcattcttttttttttcggagacggagtttcactcttgctgcccaggctggagtgcaatggtgcaatgatctcggctcactgcaacctctgcctcctgggttcaagtgattctccagcctcagcctcccgagtagctgggattatgggcgcccaccaccatgcccagctaatttttgtattttttttttttagtagagatggggtttcgccaggttggccaggctggtcttgtgaactcctggcctcaggtgatctgcccacctcatcctccaaaagtgctgggattacaggcatgagccactgcgcctggcctcagaatgcattcttacacatctatcctagacatttataagcactctaatggataacaatccaagaataaatgattgtaaaagatgatgccgaagagttgatgtcaatctttttttcctaagaaaaaaagtccgcgagtattaaatatttagatcaatgtttataaaatgattactttgtatatctcattattcctattttggaataaaaactgaccttctttaatcatatacttgtcttttgtaaatagcagcttttgtgtcattctccccactttattagttaatttaaattggaaaaaaccctcaaactaatattcttgtctgttccagtcttataaataaaacttataatgcatg

SEQ ID NO: 154 - protein, 947 aa, Homo sapiens
MWQKIEDVEWRPQTYLELEGLPCILIFSGMDPHGESLPRSLRYCDLRLINSSCLVRTALEQELGLAAYFVSNEVPLEKGARNEALESDAEKLSSTDNEDEELGTEGSTSEKRSPMKRERSRSHDSASSSLSSKASGSALGGESSAQPTALPQGEHARSPQPRGPAEEGRAPGEKQRPRASQGPPSAISRHSPGPTPQPDCSLRTGQRSVQVSVTSSCSQLSSSSGSSSSSVAPAAGTWVLQASQCSLTKACRQPPIVFLPKLVYDMVVSTDSSGLPKAASLLPSPSVMWASSFRPLLSKTMTSTEQSLYYRQWTVPRPSHMDYGNRAEGRVDGFHPRRLLLSGPPQIGKTGAYLQFLSVLSRMLVRLTEVDVYDEEEININLREESDWHYLQLSDPWPDLELFKKLPFDYIIHDPKYEDASLICSHYQGIKSEDRGMSRKPEDLYVRRQTARMRLSKYAAYNTYHHCEQCHQYMGFHPRYQLYESTLHAFAFSYSMLGEEIQLHFIIPKSKEHHFVFSQPGGQLESMRLPLVTDKSHEYIKSPTFTPTTGRHEHGLFNLYHAMDGASHLHVLVVKEYEMAIYKKYWPNHIMLVLPSIFNSAGVGAAHFLIKELSYHNLELERNRQEELGIKPQDIWPFIVISDDSCVMWNVVDVNSAGERSREFSWSERNVSLKHIMQHIEAAPDIMHYALLGLRKWSSKTRASEVQEPFSRCHVHNFIILNVDLTQNVQYNQNRFLCDDVDFNLRVHSAGLLLCRFNRFSVMKKQIVVGGHRSFHITSKVSDNSAAVVPAQYICAPDSKHTFLAAPAQLLLEKFLQHHSHLFFPLSLKNHDHPVLSVDCYLNLGSQISVCYVSSRPHSLNISCSDLLFSGLLLYLCDSFVGASFLKKFHFLKGATLCVICQDRSSLRQTVVRLELEDEWQFRLRDEFQTANAREDRPLFFLTGRHI

SEQ ID NO: 155 - DNA, 1167 bp, Homo sapiens
atgacagcctccgtgctcctccacccccgctggatcgagcccaccgtcatgtttctctacgacaacggcggcggcctggtggccgacgagctcaacaagaacatggaaggggcggcggcggctgcagcagcggctgcagcggcggcggctgccggggccgggggcgggggcttcccccacccggcggctgcggcggcagggggcaacttctcggtggcggccgcggccgcggctgcggcggccgccgcggccaaccagtgccgcaacctgatggcgcacccggcgcccttggcgccaggagccgcgtccgcctacagcagcgcccccggggaggcgcccccgtcggctgccgccgctgctgccgcggctgccgctgcagccgccgccgccgccgccgcgtcgtcctcgggaggtcccggcccggcgggcccggcggcggcagaggcggccaagcaatgcagcccctgctcggcagcggcgcagagctcgtcggggcccgcggcgctgccctatggctacttcggcagcggctactacccgtgcgcccgcatgggcccgccccccaacgccatcaagtcgtgcccccagcccccctcggccgccgccgccgccgccttcgcggacaagtacatggataccgccggcccagctgccgaggagttcagctcccgcgctaaggagttcgcgttctaccaccagggctacgcagccgggccttaccaccaccatcagcccatgcctggctacctggatatgccagtggtgccgggcctcgggggccccggcgagtcgcgccacgaacccttgggtcttcccatggaaagctaccagccctgggcgctgcccaacggctggaacggccaaatgtactgccccaaagagcaggcgcagcctccccacctctggaagtccactctgcccgacgtggtctcccatccctcggatgccagctcctataggagggggagaaagaagcgcgtgccttataccaaggtgcaattaaaagaacttgaacgggaatacgccacgaataaattcattactaaggacaaacggaggcggatatcagccacgacgaatctctctgagcggcaggtcacaatctggttccagaacaggagggttaaagagaaaaaagtcatcaacaaactgaaaaccactagttaa

SEQ ID NO: 156 - protein, 388 aa, Homo sapiens
MTASVLLHPRWIEPTVMFLYDNGGGLVADELNKNMEGAAAAAAAAAAAAAAGAGGGGFPHPAAAAAGGNFSVAAAAAAAAAAAANQCRNLMAHPAPLAPGAASAYSSAPGEAPPSAAAAAAAAAAAAAAAAAASSSGGPGPAGPAAAEAAKQCSPCSAAAQSSSGPAALPYGYFGSGYYPCARMGPPPNAIKSCPQPPSAAAAAAFADKYMDTAGPAAEEFSSRAKEFAFYHQGYAAGPYHHHQPMPGYLDMPVVPGLGGPGESRHEPLGLPMESYQPWALPNGWNGQMYCPKEQAQPPHLWKSTLPDVVSHPSDASSYRRGRKKRVPYTKVQLKELEREYATNKFITKDKRRRISATTNLSERQVTIWFQNRRVKEKKVINKLKTTS

SEQ ID NO: 157 - DNA, 3004 bp, Homo sapiens
cccttatggcgattgggcggctgcagagaccaggactcagttcccctgccctagtctgagcctagtgggtgggactcagctcagagtcagttttcagaagcaggtttcagttgcagagttttcctacacttttcctgcgctagagcagcgagcagcctggaacagacccaggcggaggacacctgtgggggagggagcgcctggaggagcttagagaccccagccgggcgtgatctcaccatgtgcggatttgcgaggcgcgccctggagctgctagagatccggaagcacagccccgaggtgtgcgaagccaccaagactgcggctcttggagaaagcgtgagcagggggccaccgcggtctccggcctgtctgcaccctgtcgcctgagctgcctgacagtgacaatgacatcccagttaccagtgtccttgaattgatagtggcttctgtttgtcagtctcatataagaactacagctcatcaggaggagatcgcagcagggtaagagacaccaacaccatgttctgcacgaagctcaaggatctcaagatcacaggagagtgtcctttctccttactggcaccaggtcaagttcctaacgagtcttcagaggaggcagcaggaagctcagagagctgcaaagcaaccgtgcccatctgtcaagacattcctgagaagaacatacaagaaagtcttcctcaaagaaaaaccagtcggagccgagtctatcttcacactttggcagagagtatttgcaaactgattttcccagagtttgaacggctgaatgttgcacttcagagaacattggcaaagcacaaaataaaagaaagcaggaaatctttggaaagagaagactttgaaaaaacaattgcagagcaagcagtgcagcagagtccagtggagttatcaaagaatctcttggtgaagaggtttttaaaatatgttacgaggaagatgaaaacatccttggggtggttggaggcacccttaaagatttttaaacagcttcagtacccttctgaaacagagcagccattgccaagaagcaggaaaaaggggcagcttgaggacgcctccattctatgcctggataaggaggatgattttctacatgtttactacttcttccctaagagaaccacctccctgattcttcccggcatcataaaggcagctgctcacgtattatatgaaacggaagtggaagtgtcgttaatgcctccctgcttccataatgattgcagcgagtttgtgaatcagccctacttgttgtactccgttcacatgaaaagcaccaagccatccctgtcccccagcaaaccccagtcctcgctggtgattcccacatcgctattctgcaagacatttccattccatttcatgtttgacaaagatatgacaattctgcaatttggcaatggcatcagaaggctgatgaacaggagagactttcaaggaaagcctaattttgaatactttgaaattctgactccaaaaatcaaccagacctttagcgggatcatgactatgttgaatatgcagtttgttgtacgagtgaggagatgggacaactctgtgaagaaatcttcaagggttatggacctcaaaggccaaatgatctacattgttgaatccagtgcaatcttgtttttggggtcaccctgtgtggacagattagaagattttacaggacgagggctctacctctcagacatcccaattcacaatgcactgagggatgtggtcttaataggggaacaagcccgagctcaagatggcctgaagaagaggctggggaagctgaaggctacccttgagcaagcccaccaagccctggaggaggagaagaaaaagacagtagaccttctgtgctccatatttccctgtgaggttgctcagcagctgtggcaagggcaagttgtgcaagccaagaagttcagtaatgtcaccatgctcttctcagacatcgttgggttcactgccatctgctcccagtgctcaccgctgcaggtcatcaccatgctcaatgcactgtacactcgcttcgaccagcagtgtggagagctggatgtctacaaggtggagaccattgcgatgcctattgtgtggcttgggggattacacaaagagagtgatactcatgctgttcagatagcgctgatggccctgaagatgatggagctctctgatgaagttatgtctccccatggagaacctatcaagatgcgaattggactgcactctggatcagtttttgctggcgtcgttggagttaaaatgccccgttactgtctttttggaaacaatgtcactctggctaacaaatttgagtcctgcagtgtaccacgaaaaatcaatgtcagcccaacaacttacagattactcaaagactgtcctggtttcgtgtttacccctcgatcaagggaggaacttccaccaaacttccctagtgaaatccccggaatctgccattttctggatgcttaccaacaaggaacaaactcaaaaccatgcttccaaaagaaagatgtggaagatgcaagccaattttttaggcaaagcatcaggaatagattagcaacctatatacctatttataagtctttggggtttgactcattgaagatgtgtagagcctctgaaagcactttagggattgtagatggctaacaagcagtattaaaatttcaggagccaagtcacaatctttctcctgtttaacatgacaaaatgtactcacttcagtacttcagctcttcaagaaaaaaaaaaaaaccttaaaaagctacttttgtgggagtatttctattatataaccagcacttactacctgtactcaaaattcagcaccttgtacatatatcagataattgtagtcaattgtacaaactgatggagtcacctgcaatctcatatcctggtggaatgccatggttattaaagtgtgtttgtgatagttgtcgtcaaaaaaaaaaaaaaaaaaaaaaaaaaaaaaaaa

SEQ ID NO: 158 - protein, 717 aa, Homo sapiens
MFCTKLKDLKITGECPFSLLAPGQVPNESSEEAAGSSESCKATVPICQDIPEKNIQESLPQRKTSRSRVYLHTLAESICKLIFPEFERLNVALQRTLAKHKIKESRKSLEREDFEKTIAEQAVQQSPVELSKNLLVKRFLKYVTRKMKTSLGWLEAPLKIFKQLQYPSETEQPLPRSRKKGQLEDASILCLDKEDDFLHVYYFFPKRTTSLILPGIIKAAAHVLYETEVEVSLMPPCFHNDCSEFVNQPYLLYSVHMKSTKPSLSPSKPQSSLVIPTSLFCKTFPFHFMFDKDMTILQFGNGIRRLMNRRDFQGKPNFEYFEILTPKINQTFSGIMTMLNMQFVVRVRRWDNSVKKSSRVMDLKGQMIYIVESSAILFLGSPCVDRLEDFTGRGLYLSDIPIHNALRDVVLIGEQARAQDGLKKRLGKLKATLEQAHQALEEEKKKTVDLLCSIFPCEVAQQLWQGQVVQAKKFSNVTMLFSDIVGFTAICSQCSPLQVITMLNALYTRFDQQCGELDVYKVETIAMPIVWLGGLHKESDTHAVQIALMALKMMELSDEVMSPHGEPIKMRIGLHSGSVFAGVVGVKMPRYCLFGNNVTLANKFESCSVPRKINVSPTTYRLLKDCPGFVFTPRSREELPPNFPSEIPGICHFLDAYQQGTNSKPCFQKKDVEDASQFFRQSIRNRLATYIPIYKSLGFDSLKMCRASESTLGIVDG

SEQ ID NO: 159 - DNA, 2710 bp, Homo sapiens
cgccggcgggactggtctgaagagacgcggggacaaagtggcaacgacttggacatctgagctgtcactgccgaaaacaggccgcaagagagataatcaatatgcatttccaagccttttggctatgtttgggtcttctgttcatctcaattaatgcagaatttatggatgatgatgttgagacggaagactttgaagaaaattcagaagaaattgatgttaatgaaagtgaactttcctcagagattaaatataagacacctcaacctataggagaagtatattttgcagaaacttttgatagtggaaggttggctggatgggtcttatcaaaagcaaagaaagatgacatggatgaggaaatttcaatatacgatggaagatgggaaattgaagagttgaaagaaaaccaggtacctggtgacagaggactggtattaaaatctagagcaaagcatcatgcaatatctgctgtattagcaaaaccattcatttttgctgataaacccttgatagttcaatatgaagtaaattttcaagatggtattgattgtggaggtgcatacattaaactcctagcagacactgatgatttgattctggaaaacttttatgataaaacatcctatatcattatgtttggaccagataaatgtggagaagattataaacttcattttatcttcagacataaacatcccaaaactggagttttcgaagagaaacatgccaaacctccagatgtagaccttaaaaagttctttacagacaggaagactcatctttatacccttgtgatgaatccagatgacacatttgaggtgttagttgatcaaacagttgtaaacaaaggaagcctcctagaggatgtggttcctcctatcaaacctcccaaagaaattgaagatcccaatgataaaaaacctgaggaatgggatgaaagagcaaaaattcctgatccttctgccgtcaaaccagaagactgggatgaaagtgaacctgcccaaatagaagattcaagtgttgttaaacctgctggctggcttgatgatgaaccaaaatttatccctgatcctaatgctgaaaaacctgatgactggaatgaagacacggatggagaatgggaggcacctcagattcttaatccagcatgtcggattgggtgtggtgagtggaaacctcccatgatagataacccaaaatacaaaggagtatggagacctccactggtcgataatcctaactatcagggaatctggagtcctcgaaaaattcctaatccagattatttcgaagatgatcatccatttcttctgacttctttcagtgctcttggtttagagctttggtctatgacctctgatatctactttgataattttattatctgttcggaaaaggaagtagcagatcactgggctgcagatggttggagatggaaaataatgatagcaaatgctaataagcctggtgtattaaaacagttaatggcagctgctgaagggcacccatggctttggttgatttatcttgtgacagcaggagtgccaatagcattaattacttcattttgttggccaagaaaagtaaagaaaaaacataaagatacagagtataaaaaaaccgacatatgtataccacaaacaaaaggagtactagagcaagaagaaaaggaagagaaagcagccctggaaaaaccaatggacctggaagaggaaaaaaagcaaaatgatggtgaaatgcttgaaaaagaagaggaaagtgaacctgaggaaaagagtgaagaagaaattgaaatcatagaagggcaagaagaaagtaatcaatcaaataagtctgggtcagaggatgagatgaaagaagcagatgagagcacaggatctggagatgggccgataaagtcagtacgcaaaagaagagtacgaaaggactaaactagattgaaatatttttaattcccgagaggatgtttggcattgtaaaaatcagcatgccagacctgaactttaatcagtctgcacatcctgtttctaatatctagcaacattatattctttcagacatttattttagtccttcatttccgaggaaaaagaagcaactttgaagttacctcatctttgaatttagaataaaagtggcacattacatatcggatctaagagattaataccattagaagttacacagttttagttgtttggagatagttttggtttgtacagaacaaaataatatgtagcagcttcattgctattggaaaaatcagttattggaatttccacttaaatggctatacaacaatataactggtagttctataataaaaatgagcatatgttctgttgtgaagagctaaatgcaataaagtttctgtatggttgtttgattctatcaacaattgaaagtgttgtatatgacccacatttacctagtttgtgtcaaattatagttacagtgagttgtttgcttaaattatagattcctttaaggacatgccttgttcataaaatcactggattatattgcagcatattttacatttgaatacaaggataatgggttttatcaaaacaaaatgatgtacagattttttttcaagtttttatagttgctttatgccagagtggtttaccccattcacaaaatttcttatgcatacattgctattgaaaataaaatttaaatattttttcatcctgaaaaaaaa

SEQ ID NO: 160 - protein, 610 aa, Homo sapiens
MHFQAFWLCLGLLFISINAEFMDDDVETEDFEENSEEIDVNESELSSEIKYKTPQPIGEVYFAETFDSGRLAGWVLSKAKKDDMDEEISIYDGRWEIEELKENQVPGDRGLVLKSRAKHHAISAVLAKPFIFADKPLIVQYEVNFQDGIDCGGAYIKLLADTDDLILENFYDKTSYIIMFGPDKCGEDYKLHFIFRHKHPKTGVFEEKHAKPPDVDLKKFFTDRKTHLYTLVMNPDDTFEVLVDQTVVNKGSLLEDVVPPIKPPKEIEDPNDKKPEEWDERAKIPDPSAVKPEDWDESEPAQIEDSSVVKPAGWLDDEPKFIPDPNAEKPDDWNEDTDGEWEAPQILNPACRIGCGEWKPPMIDNPKYKGVWRPPLVDNPNYQGIWSPRKIPNPDYFEDDHPFLLTSFSALGLELWSMTSDIYFDNFIICSEKEVADHWAADGWRWKIMIANANKPGVLKQLMAAAEGHPWLWLIYLVTAGVPIALITSFCWPRKVKKKHKDTEYKKTDICIPQTKGVLEQEEKEEKAALEKPMDLEEEKKQNDGEMLEKEEESEPEEKSEEEIEIIEGQEESNQSNKSGSEDEMKEADESTGSGDGPIKSVRKRRVRKD

SEQ ID NO: 161 - DNA, 2392 bp, Homo sapiens
gcggagcgcgcgctcccagcgaaagcagcagggcagggatctgcgttggaggaagggactgctctggtgctagaatgctgtgcgtcggaaggctgggcggcttgggagccagagcagcagctctgccgccccgccgggcgggccggggaagcctcgaagccgggatccgggcccgaagggtcagcaccagctggtctcccgtgggcgccgccttcaatgtcaagccccagggcagccgcttggacctgttcggcgagcgggcgcgtctttttggagttcctgagctgagtgccccagaaggatttcatattgcacaagaaaaagccttgagaaagacagaattgcttgtggaccgtgcatgttccaccccacctgggccccagaccgtgctgatcttcgatgagctctcggattccttatgcagagtggccgacttggctgattttgtgaaaatcgctcaccctgagccagcattcagagaagctgcggaagaagcttgtagaagtattggcaccatggtagagaagttgaacacaaatgtggatttatatcaaagtttgcaaaaattactagctgataaaaaacttgtggattcccttgatccagaaacaaggcgagtggctgaactgtttatgtttgattttgaaattagtggaatccatctagacaaacaaaagcgtaaaagagcagtggacctcaatgttaaaatcttggatttgagtagtacatttcttatgggaaccaattttcccaacaagattgagaagcatctcttaccagaacacattcgtcgtaactttacatctgctggggatcatatcataattgatggtctccacgcagaatcaccagatgacttggtgcgagaagctgcttataaaatttttctttatcccaatgctggtcaattgaaatgtttagaagaattgctcagcagcagagatcttctggcaaagttggtggggtattccacgttttctcacagggctctccaaggaacgatagctaaaaatccagagactgtcatgcagttccttgaaaaactatctgacaaactttctgaaagaactctgaaagattttgagatgatacgagggatgaaaatgaaactgaatgctcaaaattccgaagtaatgccctgggaccccccttactacagtggtgtgattcgtgcagaaaggtataatattgagcccagcctatattgcccgtttttctctcttggagcatgcatggaaggcctgaatattttgcttaacagactgttggggatttcattatatgcagagcagcctgcaaaaggagaggtgtggagcgaagatgtccgaaaactggctgttgttcatgaatctgaaggattgttggggtacatttactgtgatttttttcagcgagcagacaaaccacatcaggattgccatttcactatccgtggaggcagactaaaggaagatggagactatcaactcccacttgtagttcttatgctgaatcttccccgttcctcaaggagttctccaactttgctaactcctggcatgatggaaaatcttttccatgaaatgggacatgccatgcattcaatgctaggacgtactcgttaccaacacgtcactgggaccaggtgccctactgattttgctgaggttccttctattctgatggagtactttgcaaatgattatcgagtagttaaccaatttgccagacattatcagactggacagccactgccaaaaaatatggtgtctcgtctttgtgaatctaaaaaggtttgtgctgcagctgatatgcaacttcaggtcttttatgccactctggatcaaatctaccatgggaagcatcccctgaggaattcaaccacagacattctcaaggaaacacaagagaaattctatggcctaccatatgttccaaatactgcctggcagctgcgattcagccacctcgtggggtatggtgctagatattactcttacctcatgtccagagcggtcgcctccatggtttggaaggagtgttttctacaggatcctttcaacagggctgccggggagcgctatcgcagggagatgctggcccacggtggaggcagggagcccatgctcatggttgaaggtatgcttcagaagtgtccttctgttgatgacttcgtaagtgccctcgtttccgacttggatctggacttcgaaactttcctcatggattctgaataaaagaaacactctacacctctaatcaaggtcatgtagtaatgactttgttataaatgctacagctgtgagagcttgtttctgattgtttcattgttcgcttctgtaattctgaaaaactttaaactggtagaacttggaataaataatttgttttaattaaaaaaaaaaaaaaaaaa

SEQ ID NO: 162 - protein, 713 aa, Homo sapiens
MLCVGRLGGLGARAAALPPRRAGRGSLEAGIRARRVSTSWSPVGAAFNVKPQGSRLDLFGERARLFGVPELSAPEGFHIAQEKALRKTELLVDRACSTPPGPQTVLIFDELSDSLCRVADLADFVKIAHPEPAFREAAEEACRSIGTMVEKLNTNVDLYQSLQKLLADKKLVDSLDPETRRVAELFMFDFEISGIHLDKQKRKRAVDLNVKILDLSSTFLMGTNFPNKIEKHLLPEHIRRNFTSAGDHIIIDGLHAESPDDLVREAAYKIFLYPNAGQLKCLEELLSSRDLLAKLVGYSTFSHRALQGTIAKNPETVMQFLEKLSDKLSERTLKDFEMIRGMKMKLNAQNSEVMPWDPPYYSGVIRAERYNIEPSLYCPFFSLGACMEGLNILLNRLLGISLYAEQPAKGEVWSEDVRKLAVVHESEGLLGYIYCDFFQRADKPHQDCHFTIRGGRLKEDGDYQLPLVVLMLNLPRSSRSSPTLLTPGMMENLFHEMGHAMHSMLGRTRYQHVTGTRCPTDFAEVPSILMEYFANDYRVVNQFARHYQTGQPLPKNMVSRLCESKKVCAAADMQLQVFYATLDQIYHGKHPLRNSTTDILKETQEKFYGLPYVPNTAWQLRFSHLVGYGARYYSYLMSRAVASMVWKECFLQDPFNRAAGERYRREMLAHGGGREPMLMVEGMLQKCPSVDDFVSALVSDLDLDFETFLMDSE

SEQ ID NO: 163 - DNA, 3923 bp, Homo sapiens
acagaagaaatagcaagtgccgagaagctggcatcagaaaaacagaggggagatttgtgtggctgcagccgagggagaccaggaagatctgcatggtgggaaggacctgatgatacagaggaattacaacacatatacttagtgtttcaatgaacaccaagataaataagtgaagagctagtccgctgtgagtctcctcagtgacacagggctggatcaccatcgacggcactttctgagtactcagtgcagcaaagaaagactacagacatctcaatggcaggggtgagaaataagaaaggctgctgactttaccatctgaggccacacatctgctgaaatggagataattaacatcactagaaacagcaagatgacaatataatgtctaagtagtgacatgtttttgcacatttccagcccctttaaatatccacacacacaggaagcacaaaaggaagcacagagatccctgggagaaatgcccggccgccatcttgggtcatcgatgagcctcgccctgtgcctggtcccgcttgtgagggaaggacattagaaaatgaattgatgtgttccttaaaggatgggcaggaaaacagatcctgttgtggatatttatttgaacgggattacagatttgaaatgaagtcacaaagtgagcattaccaatgagaggaaaacagacgagaaaatcttgatggcttcacaagacatgcaacaaacaaaatggaatactgtgatgacatgaggcagccaagctggggaggagataaccacggggcagagggtcaggattctggccctgctgcctaaactgtgcgttcataaccaaatcatttcatatttctaaccctcaaaacaaagctgttgtaatatctgatctctacggttccttctgggcccaacattctccatatatccagccacactcatttttaatatttagttcccagatctgtactgtgacctttctacactgtagaataacattactcattttgttcaaagacccttcgtgttgctgcctaatatgtagctgactgtttttcctaaggagtgttctggcccaggggatctgtgaacaggctgggaagcatctcaagatctttccagggttatacttactagcacacagcatgatcattacggagtgaattatctaatcaacatcatcctcagtgtctttgcccatactgaaattcatttcccacttttgtgcccattctcaagacctcaaaatgtcattccattaatatcacaggattaacttttttttttaacctggaagaattcaatgttacatgcagctatgggaatttaattacatattttgttttccagtgcaaagatgactaagtcctttatccctcccctttgtttgattttttttccagtataaagttaaaatgcttagccttgtactgaggctgtatacagcacagcctctccccatccctccagccttatctgtcatcaccatcaacccctcccataccacctaaacaaaatctaacttgtaattccttgaacatgtcaggacatacattattccttctgcctgagaagctcttccttgtctcttaaatctagaatgatgtaaagttttgaataagttgactatcttacttcatgcaaagaagggacacatatgagattcatcatcacatgagacagcaaatactaaaagtgtaatttgattataagagtttagataaatatatgaaatgcaagagccacagagggaatgtttatggggcacgtttgtaagcctgggatgtgaagcaaaggcagggaacctcatagtatcttatataatatacttcatttctctatctctatcacaatatccaacaagcttttcacagaattcatgcagtgcaaatccccaaaggtaacctttatccatttcatggtgagtgcgctttagaattttggcaaatcatactggtcacttatctcaactttgagatgtgtttgtccttgtagttaattgaaagaaatagggcactcttgtgagccactttagggttcactcctggcaataaagaatttacaaagagctactcaggaccagttgttaagagctctgtgtgtgtgtgtgtgtgtgtgtgagtgtacatgccaaagtgtgcctctctctcttgacccattatttcagacttaaaacaagcatgttttcaaatggcactatgagctgccaatgatgtatcaccaccatatctcattattctccagtaaatgtgataataatgtcatctgttaacataaaaaaagtttgacttcacaaaagcagctggaaatggacaaccacaatatgcataaatctaactcctaccatcagctacacactgcttgacatatattgttagaagcacctcgcatttgtgggttctcttaagcaaaatacttgcattaggtctcagctggggctgtgcatcaggcggtttgagaaatattcaattctcagcagaagccagaatttgaattccctcatcttttaggaatcatttaccaggtttggagaggattcagacagctcaggtgctttcactaatgtctctgaacttctgtccctctttgtgttcatggatagtccaataaataatgttatctttgaactgatgctcataggagagaatataagaactctgagtgatatcaacattagggattcaaagaaatattagatttaagctcacactggtcaaaaggaaccaagatacaaagaactctgagctgtcatcgtccccatctctgtgagccacaaccaacagcaggacccaacgcatgtctgagatccttaaatcaaggaaaccagtgtcatgagttgaattctcctattatggatgctagcttctggccatctctggctctcctcttgacacatattagcttctagcctttgcttccacgacttttatcttttctccaacacatcgcttaccaatcctctctctgctctgttgctttggacttccccacaagaatttcaacgactctcaagtcttttcttccatccccaccactaacctgaatgcctagacccttatttttattaatttccaatagatgctgcctatgggctatattgctttagatgaacattagatatttaaagctcaagaggttcaaaatccaactcattatcttctctttctttcacctccctgctcctctccctatattactgattgcactgaacagcatggtccccaatgtagccatgcaaatgagaaacccagtggctccttgtggtacatgcatgcaagactgctgaagccagaaggatgactgattacgcctcatgggtggaggggaccactcctgggccttcgtgattgtcaggagcaagacctgagatgctccctgccttcagtgtcctctgcatctcccctttctaatgaagatccatagaatttgctacatttgagaattccaattaggaactcacatgttttatctgccctatcaattttttaaacttgctgaaaattaagttttttcaaaatctgtccttgtaaattactttttcttacagtgtcttggcatactatatcaactttgattctttgttacaacttttcttactcttttatcaccaaagtggcttttattctctttattattattattttcttttactactatattacgttgttattattttgttctctatagtatcaatttatttgatttagtttcaatttatttttattgctgacttttaaaataagtgattcggggggtgggagaacaggggagggagagcattaggacaaatacctaatgcatgtgggacttaaaacctagatgatgggttgataggtgcagcaaaccactatggcacacgtatacctgtgtaacaaacctacacattctgcacatgtatcccagaacgtaaagtaaaatttaaaaaaaagtga

SEQ ID NO: 164 - DNA, 8488 bp, Homo sapiens
atgatgatgaacgtccccggcggaggagcggccgcggtgatgatgacgggctacaataatggtcgctgtccccggaattctctctacagtgactgcattattgaggagaagacggtggtcctgcagaaaaaagacaatgagggctttggattcgtgcttcgaggggccaaagctgacacacccattgaagaattcacaccaacaccggctttcccagccctacagtacctggagtccgtggatgaaggtggggtggcgtggcaagccggactaaggaccggggacttcttgattgaggttaacaatgagaatgttgtcaaagtcggccacaggcaggtggtgaacatgatccggcagggagggaatcacctggtccttaaggtggtcacggtgaccaggaatctggaccccgacgacaccgccaggaagaaagctcccccgcctccaaagcgggcaccgaccacagccctcaccctgcgctccaagtccatgacctcggagctggaggagctcgtggataaagataaacccgaggagatagtcccggcctccaagccctcccgcgctgctgagaacatggctgtggaaccgagggtggcgaccatcaagcagcggcccagcagccggtgcttcccggcgggctcagacatgaactctgtgtacgaacgccaaggaatcgccgtgatgacgcccactgttcctgggagcccaaaagccccgtttctgggcatccctcgaggtacgatgcgaaggcagaaatcaatagacagcagaatctttctatcaggaataacagaggaagagcggcagtttctggctcctccaatgctgaagttcaccagaagcctgtccatgccggacacctctgaggacatcccccctccaccgcagtctgtgcccccgtccccaccaccaccttccccaaccacttacaactgccccaagtccccaactccaagagtctacgggacgattaagcctgcgttcaatcagaattctgccgccaaggtgtcccccgccaccaggtccgacaccgtggccaccatgatgagggagaaggggatgtacttcaggagagagctggaccgctactccttggactctgaagacctctacagtcggaatgccggcccgcaagccaacttccgcaacaagagaggccagatgccagaaaacccatactcagaggtggggaagatcgccagcaaagccgtctacgtccccgccaagcccgccaggcggaaggggatgctggtgaagcagtccaacgtggaggacagccccgagaagacgtgctccatccctatcccgaccatcatcgtgaaggagccgtccaccagcagcagcggcaagagcagccagggcagcagcatggagatcgacccccaggccccggagccaccgagccagctgcggcctgacgaaagcctgaccgtcagcagcccctttgccgccgccatcgccggagccgtccgcgaccgtgagaagcggctggaagccaggaggaactccccggccttcctctccacagacctgggggatgaggatgtgggcctggggccacccgcccccaggacgcggccctccatgttccccgaggagggggattttgctgacgaggacagcgctgagcagctgtcatcccccatgccgagtgccacgcccagggagcccgaaaaccatttcgtgggtggcgccgaggccagtgctccgggtgaggctgggaggccgctgaattccacgtccaaagcccaggggcccgagagcagcccagcagtgccctccgcgagcagcggcacagccggccccgggaattatgtccacccactcacagggcggctgcttgatcccagctccccgctggccctggcactctccgcaagggaccgagccatgaaggagtctcaacagggacccaaaggggaggcccccaaggccgacctcaacaaacctctttacattgataccaaaatgcggcccagcctggatgccggcttccctacggtcaccaggcagaacacccggggacccctgaggcggcaggagacggagaacaagtacgagaccgacctgggccgagaccggaaaggcgatgacaagaagaacatgctgatcgacatcatggacacgtcccagcagaagtcggctggcctgctgatggtgcacaccgtggacgccactaagctggacaacgccctgcaggaagaggacgagaaggcagaggtggagatgaagccagacagctcgccgtccgaggtgccagaaggtgtttccgaaaccgaaggtgctttacagatctccgctgcccccgagcccaccaccgtgcccggcagaaccatcgtcgcggtgggctccatggaagaggcggtgattttgccattccgcatccctcctccccctctggcatccgtggacttggatgaggattttatttttacagagccattgcctcctcccctggaatttgcaaatagttttgatatccccgatgaccgggcagcttctgtcccggctctctcagacttagtgaagcagaagaaaagcgacacccctcagtccccttcgttgaactccagccaaccaaccaactctgcagacagcaagaagccagccagtctttcaaactgtctgcctgcctcattcctgccaccccctgaaagctttgacgccgtcgccgactctgggatcgaggaggtggacagccggagtagcagcgaccaccacctcgagacgaccagcactatctccaccgtgtctagcatctccaccctgtcttccgaaggtggagagaatgtggacacctgcacagtctatgcagatgggcaagcatttatggttgacaaacccccagtacctcctaagccaaaaatgaagcccatcattcacaaaagcaatgcactttatcaagacgcgctcgtggaagaagatgtagatagctttgttatccccccgcccgctcccccgcccccgccgggcagtgcccagcctgggatggccaaggttctccagccaaggacctccaagttgtggggcgacgtcacagagatcaaaagcccgattctctcaggcccaaaggcaaacgttattagtgaattgaactctatcctacagcaaatgaaccgagagaaattggcaaagccgggggaaggactggattcaccaatgggagccaagtccgccagcctcgctccaagaagcccggagatcatgagcaccatctcaggtacacggagcacgacggtcaccttcactgttcgccccggcacctcccagcccatcaccctgcagagccggccccccgactatgaaagcaggacctcaggaacaagacgtgccccaagccctgtggtctcgccaacagagatgaacaaagagaccctgcccgcccccctgtctgctgccaccgcctctccttctcccgctctctcagatgtctttagccttccaagccagcccccttctggggatctatttggcttgaacccagcgggacgcagtaggtcgccatccccctcgatactgcaacagccaatctcaaataagccttttacaactaaacctgtccacctgtggactaaaccagatgtggccgattggctggaaagtctaaacttgggtgaacataaagaggccttcatggacaatgagatcgatggcagtcacttaccaaacctgcagaaggaggacctcatcgatcttggggtaactcgagtcgggcacagaatgaacatagaaagggctttgaaacagctgctggacagataaggacggctgctctccacctcgcagactgctcttgttataagtagagatgggctcgtgctgaaacatctgaatgccaagcgaagtctgtgagcatcaaccccactccatgggtttgtctcctggtacccaaagaaatactgagttgtgtccacaacatggctgggtcttcagacccctggctcaccatgtgggtgtcttgggcagtttctatcacacatgggacaaggggagggagtttttctaacatggaaaaagattcccagcctgccgcccagcatgcaggtggcctcgctttgccgggtccgagaggctccccgtcaattttgcacgggatcctagctcttgtaggcagacaccagtgcactctagatacctcctgagacctccgtcctctgctttccgggcagctctcaccaccccaggccccggcatgaggcctttcctcagtcctgtggcctctcagaggacacctgatgctcacctgcccctctttctcctgcacttggcttgcagtgagatgctcccagatgcatttgtccagtgccccatcatgggcctgaaaggcagagaaactttttcctacacagattcttttccccatctcctcctgtggtttgcatccatggctctttggccatgaggttcctggcagtgctgggagtttggatgggatcgtgcccagctttgcttagctttctttatttctgcaaatctgttagcataattccaaggtggccaagcagatgtcacatggagttagtcaaagcacaaagtcacgattccacaatggaggggagacctggccaagggagccagccagcgtgcaactgcccaagctccaggtctccaggacaagagcagttgtctgccatgagcacccatccaggatggagaataagggcttctctgcctctcagaattctttttaattgaagatgtcttgagctctgcaaagatcagagcaggtgagcatccactttgacatgaaggacaagaagacgcatggctcatggcgggcacatgcggctgccagtgagacagcgtctcctctgggagctgggcgggcacagcatcctcagttctgtgcccagccaagggtgagcatctctgctgagacagtccttttgctctcggaggccagggaagatggtacttagaggcttttcccctatcgctctgggtgtctaggaatcccaccagcttgtcttaacagtacaacagcttctttgaggacccagtgggtatggagtatagacagaacccagggttgagaacagaaggtgggcggcaggatcagagtgaaagcagaggcgtgaggagaggaaagcagggaggtctcctgggctgccaggtcagcctctctggcaaggctttcttgagccccgcccctttctttccccggagtccctccaccccataacaatacctcgaatttccaaaagaggtcaccagatgcacatgggccgcaaaacacacagtcaggcttccagcacattctcccccatttggaggatactcgaatgtcaggtttttggttttattattatttcagaactagctcagcccatctctaattataaaacatggttttgttttttttttttcctttttttcttgattaggtctggaacagctctagaatgaacacataaaatttagcaatttaaaatctttctttactgcaagtttaaatagttgtacagatagtttataagcacaatattttaagaaaaaaaagtggctggtctactaggcagcctttgtgccacttcagtgctagaaagttaaagaaaaaaaaacttttgtgatttaataatactatttctgtggaataattataaaagtatgacctttttaaatcaaccttatttggatgcatctgaaccagcagagctgtgttatattttctatctttgctagaacttcgtcattgaaggacaatttcttcaaagtggttacaattcataatgcagcagtttctccaaaaacaaaaacaaaacacacaccacacacacgcgcttttccagtcacacacccctgatgttggaaccaagtttttggaccttctgttccaaaaccttttgcaggtcaatctttgtatttgaaatgatccaatccaacttgaagtcaattgaatattaaggcgctttacttccgtgtgctttcagtttttccatcatgagatgaatgagcattactctagataaatttcaagacaggatactacaggtggcctgctgaggctgccccatattttagaaaatgtaaaaatggtggtttggccattaatttgtcttccatttgatgataccgcaaaattccgtgagtccattcctttggcatggcactttccctgggcctacagttggtattacctctgtgctcagtgccaggcaaaacactagctcaaaggagagtcaaggaaaccgctggcagacgataaccagtcgaaactcgtgacttcggtttgttgaactttggcagccagttggtgagggccagatgttattccctttcttaaagatactccaagccacatgccactaaccacaagcaagctggctgcaagactaaagagctgataacatagtttatttttacactgtcttattatagagaagtaatagacctatcagaacctgcactgaccaacaaataaacacatgttgccaagatgaatcggtctctatctctatctgcttattttggtactgaaagcaatagttcctcattcaaatcaccacccactgttctccccctttgggacatgttaggacgaggccctattccatgcccctctttaatggtggaacaaatgttaaactgctcatctaaagatcatgttgatattattccaggttttaagatcaacttttgttacatactgtaatttaaataaactgcatttacatgcctagtttctgtaatattgtgtatacaaaacccaaatctctcaaaatgtaaattatgtatacctgccaagataccttttccagggtgtctgcgcacattttaagttaattcacataatataaaaattactcaatgtgactgttgatttgctgaactttacatatcacaaagtgaattatttgtgatactttagttaataaaatggtaaatttttttctcagttattgaacaagcaagcattatccagttgatctggcaatgactttttgtgtgtgggccacaatattgattttcccattaacaatttttttttgttttttaaatactaatatgtttcacactatagtttgtgtaacaacacgtgttcgcattatctatgttgctgttacttttgtgcttttattctttttagactttataaaaaaaaaaaaaagctcctgtaatttgcactttctcccaatccttaaatctcttgtatggcaaccaaaattactgtaaaaaaataaatatactattgcactaaggttgtggttctgattgcaaacaaacagtgaacactgtctgaattaaacaaaaagctgcccgacttgcaatctaatgtagattatctcaggcattgtggccagctctgcctctctaaaactgaccagaaaaatctctctcatcgagtaaacaggctcctgtcactgagctaatctgccttggttccatttccttattctcaatttatcaatggatacgtgcatgttatttcagaattatgcaaaacgtcaaaatctgcttctgtgaccgctgctataggcgtggagctgaggctcggcttttccttttgttctgggtggaagcagcggtgccgcggagggccagccagatccggacccttcccttagggtccagtctccccacaccccagcagggtgtcttctagccataaggccaagggagtggcagaactgggccgcctctctggttgacaagcaaaccacatgctaaggcttggagcaagagagaatttgtgtctattggcaaagaactaagccaggaagacatgggccatccctccgctttagggaagcatattttaaacctaaacgttgaacttcttctttggcctcaccagtgaaaacttgttgtctttagttcctaaagtttcttctactttggcacattccccagttgagcagcagcctctatgcttccacgttcaggaaaaattccagtcctcatatcttttgtagttcaccctcaagctctcccgcttcaccatccaatagtttctcccaaaccttggcacccccctagactttgcttccaatggtttcttccagaccacttttcctagatgaatatattcgtttaccttactaggaaaattattggaagattttttcttttacttgaaattggaggcattttaataactggcgaactggaatgtgtttctgtatttgtagacaaccatgtacccatgcaagtaggtgaacattccacagtggctgggtgaccacagcagctgcatgcagacaggactgcccgtgctttgtggggaatcagagaatttccaaacttgtttctcagacttccgcagatctcatcactttgatttctaatccatgctgtattggtgattttgtttatcgttcctgtaacttgttctacattccacagtctttaccgttttatgttcaaaattacaacaatccctgtccattgattccactctggaactctttgttcatgccaattttgaaattttaatacgagccttcaaataaacacagaaaagaaaaaaaaaaaaaaaaaaaaaaaa

SEQ ID NO: 165 - protein, 1254 aa, Homo sapiens
MMMNVPGGGAAAVMMTGYNNGRCPRNSLYSDCIIEEKTVVLQKKDNEGFGFVLRGAKADTPIEEFTPTPAFPALQYLESVDEGGVAWQAGLRTGDFLIEVNNENVVKVGHRQVVNMIRQGGNHLVLKVVTVTRNLDPDDTARKKAPPPPKRAPTTALTLRSKSMTSELEELVDKDKPEEIVPASKPSRAAENMAVEPRVATIKQRPSSRCFPAGSDMNSVYERQGIAVMTPTVPGSPKAPFLGIPRGTMRRQKSIDSRIFLSGITEEERQFLAPPMLKFTRSLSMPDTSEDIPPPPQSVPPSPPPPSPTTYNCPKSPTPRVYGTIKPAFNQNSAAKVSPATRSDTVATMMREKGMYFRRELDRYSLDSEDLYSRNAGPQANFRNKRGQMPENPYSEVGKIASKAVYVPAKPARRKGMLVKQSNVEDSPEKTCSIPIPTIIVKEPSTSSSGKSSQGSSMEIDPQAPEPPSQLRPDESLTVSSPFAAAIAGAVRDREKRLEARRNSPAFLSTDLGDEDVGLGPPAPRTRPSMFPEEGDFADEDSAEQLSSPMPSATPREPENHFVGGAEASAPGEAGRPLNSTSKAQGPESSPAVPSASSGTAGPGNYVHPLTGRLLDPSSPLALALSARDRAMKESQQGPKGEAPKADLNKPLYIDTKMRPSLDAGFPTVTRQNTRGPLRRQETENKYETDLGRDRKGDDKKNMLIDIMDTSQQKSAGLLMVHTVDATKLDNALQEEDEKAEVEMKPDSSPSEVPEGVSETEGALQISAAPEPTTVPGRTIVAVGSMEEAVILPFRIPPPPLASVDLDEDFIFTEPLPPPLEFANSFDIPDDRAASVPALSDLVKQKKSDTPQSPSLNSSQPTNSADSKKPASLSNCLPASFLPPPESFDAVADSGIEEVDSRSSSDHHLETTSTISTVSSISTLSSEGGENVDTCTVYADGQAFMVDKPPVPPKPKMKPIIHKSNALYQDALVEEDVDSFVIPPPAPPPPPGSAQPGMAKVLQPRTSKLWGDVTEIKSPILSGPKANVISELNSILQQMNREKLAKPGEGLDSPMGAKSASLAPRSPEIMSTISGTRSTTVTFTVRPGTSQPITLQSRPPDYESRTSGTRRAPSPVVSPTEMNKETLPAPLSAATASPSPALSDVFSLPSQPPSGDLFGLNPAGRSRSPSPSILQQPISNKPFTTKPVHLWTKPDVADWLESLNLGEHKEAFMDNEIDGSHLPNLQKEDLIDLGVTRVGHRMNIERALKQLLDR

SEQ ID NO: 166 - DNA, 2012 bp, Homo sapiens
actgcgaagcggcttcttcagagcacgggctggaactggcaggcaccgcgagcccctagcacccgacaagctgagtgtgcaggacgagtccccaccacacccacaccacagccgctgaatgaggcttccaggcgtccgctcgcggcccgcagagccccgccgtgggtccgcccgctgaggcgcccccagccagtgcgcttacctgccagactgcgcgccatggggcaacccgggaacggcagcgccttcttgctggcacccaatagaagccatgcgccggaccacgacgtcacgcagcaaagggacgtgtgggtggtgggcatgggcatcgtcatgtctctcatcgtcctggccatcgtgtttggcaatgtgctggtcatcacagccattgccaagttcgagcgtctgcagacggtcaccaactacttcatcacttcactggcctgtgctgatctggtcatgggcctggcagtggtgccctttggggccgcccatattcttatgaaaatgtggacttttggcaacttctggtgcgagttttggacttccattgatgtgctgtgcgtcacggccagcattgagaccctgtgcgtgatcgcagtggatcgctactttgccattacttcacctttcaagtaccagagcctgctgaccaagaataaggcccgggtgatcattctgatggtgtggattgtgtcaggccttacctccttcttgcccattcagatgcactggtaccgggccacccaccaggaagccatcaactgctatgccaatgagacctgctgtgacttcttcacgaaccaagcctatgccattgcctcttccatcgtgtccttctacgttcccctggtgatcatggtcttcgtctactccagggtctttcaggaggccaaaaggcagctccagaagattgacaaatctgagggccgcttccatgtccagaaccttagccaggtggagcaggatgggcggacggggcatggactccgcagatcttccaagttctgcttgaaggagcacaaagccctcaagacgttaggcatcatcatgggcactttcaccctctgctggctgcccttcttcatcgttaacattgtgcatgtgatccaggataacctcatccgtaaggaagtttacatcctcctaaattggataggctatgtcaattctggtttcaatccccttatctactgccggagcccagatttcaggattgccttccaggagcttctgtgcctgcgcaggtcttctttgaaggcctatgggaatggctactccagcaacggcaacacaggggagcagagtggatatcacgtggaacaggagaaagaaaataaactgctgtgtgaagacctcccaggcacggaagactttgtgggccatcaaggtactgtgcctagcgataacattgattcacaagggaggaattgtagtacaaatgactcactgctgtaaagcagtttttctacttttaaagacccccccccccccaacagaacactaaacagactatttaacttgagggtaataaacttagaataaaattgtaaaaattgtatagagatatgcagaaggaagggcatccttctgccttttttatttttttaagctgtaaaaagagagaaaacttatttgagtgattatttgttatttgtacagttcagttcctctttgcatggaatttgtaagtttatgtctaaagagctttagtcctagaggacctgagtctgctatattttcatgacttttccatgtatctacctcactattcaagtattaggggtaatatattgctgctggtaatttgtatctgaaggagattttccttcctacacccttggacttgaggattttgagtatctcggacctttcagctgtgaacatggactcttcccccactcctcttatttgctcacacggggtattttaggcagggatttgaggagcagcttcagttgttttcccgagcaaaggtctaaagtttacagtaaataaaatgtttgaccatg

SEQ ID NO: 167 - protein, 413 aa, Homo sapiens
MGQPGNGSAFLLAPNRSHAPDHDVTQQRDEVWVVGMGIVMSLIVLAIVFGNVLVITAIAKFERLQTVTNYFITSLACADLVMGLAVVPFGAAHILMKMWTFGNFWCEFWTSIDVLCVTASIETLCVIAVDRYFAITSPFKYQSLLTKNKARVIILMVWIVSGLTSFLPIQMHWYRATHQEAINCYANETCCDFFTNQAYAIASSIVSFYVPLVIMVFVYSRVFQEAKRQLQKIDKSEGRFHVQNLSQVEQDGRTGHGLRRSSKFCLKEHKALKTLGIIMGTFTLCWLPFFIVNIVHVIQDNLIRKEVYILLNWIGYVNSGFNPLIYCRSPDFRIAFQELLCLRRSSLKAYGNGYSSNGNTGEQSGYHVEQEKENKLLCEDLPGTEDFVGHQGTVPSDNIDSQGRNCSTNDSLL

SEQ ID NO: 168 - DNA, 3741 bp, Homo sapiens
gaattcgttgttgggaaggactggggaaacagctgtaacatttgccaccctcagaagctgctggtcctgtgtcacaccaccttagcctcttgatcgaggaagattctcgctgaagtctgttaattctactttttgagtacttatgaataaccacgtgtcttcaaaaccatctaccatgaagctaaaacataccatcaaccctattcttttatattttatacattttctaatatcactttatactattttaacatacattccgttttattttttctccgagtcaagacaagaaaaatcaaaccgaattaaagcaaagcctgtaaattcaaaacctgattctgcatacagatctgttaatagtttggatggtttggcttcagtattataccctggatgtgatactttagataaagtttttacatatgcaaaaaacaaatttaagaacaaaagactcttgggaacacgtgaagttttaaatgaggaagatgaagtacaaccaaatggaaaaatttttaaaaaggttattcttggacagtataattggctttcctatgaagatgtctttgttcgagcctttaattttggaaatggattacagatgttgggtcagaaaccaaagaccaacatcgccatcttctgtgagaccagggccgagtggatgatagctgcacaggcgtgttttatgtataattttcagcttgttacattatatgccactctaggaggtccagccattgttcatgcattaaatgaaacagaggtgaccaacatcattactagtaaagaactcttacaaacaaagttgaaggatatagtttctttggtcccacgcctgcggcacatcatcactgttgatggaaagccaccgacctggtccgacttccccaagggcatcattgtgcataccatggctgcagtggaggccctgggagccaaggccagcatggaaaaccaacctcatagcaaaccattgccctcagatattgcagtaatcatgtacacaagtggatccacaggacttccaaagggagtcatgatctcacatagtaacattattgctggtataactgggatggcagaaaggattccagaactaggagaggaagatgtctacattggatatttgcctctggcccatgttctagaattaagtgctgagcttgtctgtctttctcacggatgccgcattggttactcttcaccacagactttagcagatcagtcttcaaaaattaaaaaaggaagcaaaggggatacatccatgttgaaaccaacactgatggcagcagttccggaaatcatggatcggatctacaaaaatgtcatgaataaagtcagtgaaatgagtagttttcaacgtaatctgtttattctggcctataattacaaaatggaacagatttcaaaaggacgtaatactccactgtgcgacagctttgttttccggaaagttcgaagcttgctagggggaaatattcgtctcctgttgtgtggtggcgctccactttctgcaaccacgcagcgattcatgaacatctgtttctgctgtcctgttggtcagggatacgggctcactgaatctgctggggctggaacaatttccgaagtgtgggactacaatactggcagagtgggagcaccattagtttgctgtgaaatcaaattaaaaaactgggaggaaggtggatactttaatactgataagccacaccccaggggtgaaattcttattgggggccaaagtgtgacaatggggtactacaaaaatgaagcaaaaacaaaagctgatttctctgaagatgaaaatggacaaaggtggctctgtactggggatattggagagtttgaacccgatggatgcttaaagattattgatcgtaaaaaggaccttgtaaaactacaggcaggggaatatgtttctcttgggaaagtagaggcagctttgaagaatcttccactagtagataacatttgtgcatatgcaaacagttatcattcttatgtcattggatttgttgtgccaaatcaaaaggaactaactgaactagctcgaaagaaaggacttaaagggacttgggaggagctgtgtaacagttgtgaaatggaaaatgaggtacttaaagtgctttccgaagctgctatttcagcaagtctggaaaagtttgaaattccagtaaaaattcgtttgagtcctgaaccgtggacccctgaaactggtctggtgacagatgccttcaagctgaaacgcaaagagcttaaaacacattaccaggcggacattgagcgaatgtatggaagaaaataattattctcttctggcatcagtttgctacagtgagctcacatcaaataggaaaatacttgaaatgcatgtctcaagctgcaaggcaaactccattcctcatattaaactattacttctcatgacgtcaccatttttaactgacaggattagtaaaacattaagacagcaaacttgtgtctgtctcttctttcattttccccgccaccaacttactttaccacctatgactgtacttgtcagtatgagaatttttctgaatcatattggggaagcagtgattttaaaacctcaagtttttaaacatgatttatatgttctgtataatgttcagtttgtaactttttaaaagtttggatgtatagagggataaataggaaatataagaattggttatttgggggcttttttacttactgtatttaaaaatacaagggtattgatatgaaattatgtaaatttcaaatgcttatgaatcaaatcattgttgaacaaaagatttgttgctgtgtaattattgtcttgtatgcatttgagagaaataaatatacccatacttatgttttaagaagttgagatcttgtgaatatatgcctgtcagtgtcttctttatatatttattttttattagaaaaaatgaagtttggttggtgatgcatgaaacaaaatagcaagagagggttatagtttaatagtaagggagataacacagcatgtgtagcaccagttgataattggtctctagtagcttactgtcaaaatgttcaatgaagtcttctgttcatctgttgaaactaggaaaatacccaaacttaaatggaagaattctgaaagagaggatagaatttaaagaacaagagtatataaagttattctttgaatatttcgttgactatatgtacattgagttatctatatttgtaaacaaattagtcatggaaaattattctattccaaagtctccttttagtctagataatcattatttcattttaaaattagtgtttttcatagtttgcactgatgcgtgtatggatgtgtgtgagtcagtggtagcttatttaaaaagcaccttatcctttctcccataacctttgtacactaaaaaatgaaagaatttagaatgtatttgatgatagcattctcactaagacacatgagaatttaactttataaccgcgtgagttaagatttaattcataggttttgatgtcattgttgaagttatttgtaattcagaaaccttgcttgtgtgatacatagtaagtctcttcatttattactgcttgcctgttgttatatctggattatcaaaagcaatagtgcaccaattaagatgtgctcaaatcaggacttaaatcataggcaccacatttttcatgtcagactagttactttgttgattctcagttactgtaggcatcaaaaggcaaaaatca

SEQ ID NO: 169 - protein, 720 aa, Homo sapiens
MNNHVSSKPSTMKLKHTINPILLYFIHFLISLYTILTYIPFYFFSESRQEKSNRIKAKPVNSKPDSAYRSVNSLDGLASVLYPGCDTLDKVFTYAKNKFKNKRLLGTREVLNEEDEVQPNGKIFKKVILGQYNWLSYEDVFVRAFNFGNGLQMLGQKPKTNIAIFCETRAEWMIAAQACFMYNFQLVTLYATLGGPAIVHALNETEVTNIITSKELLQTKLKDIVSLVPRLRHIITVDGKPPTWSDFPKGIIVHTMAAVEALGAKASMENQPHSKPLPSDIAVIMYTSGSTGLPKGVMISHSNIIAGITGMAERIPELGEEDVYIGYLPLAHVLELSAELVCLSHGCRIGYSSPQTLADQSSKIKKGSKGDTSMLKPTLMAAVPEIMDRIYKNVMNKVSEMSSFQRNLFILAYNYKMEQISKGRNTPLCDSFVFRKVRSLLGGNIRLLLCGGAPLSATTQRFMNICFCCPVGQGYGLTESAGAGTISEVWDYNTGRVGAPLVCCEIKLKNWEEGGYFNTDKPHPRGEILIGGQSVTMGYYKNEAKTKADFSEDENGQRWLCTGDIGEFEPDGCLKIIDRKKDLVKLQAGEYVSLGKVEAALKNLPLVDNICAYANSYHSYVIGFVVPNQKELTELARKKGLKGTWEELCNSCEMENEVLKVLSEAAISASLEKFEIPVKIRLSPEPWTPETGLVTDAFKLKRKELKTHYQADIERMYGRK

SEQ ID NO: 170 - DNA, 4121 bp, Homo sapiens
agcaacgacgccgggcagcgggagcggcggccgcgccatgtggctgctggggccgctgtgcctgctgctgagcagcgccgcggagagccagctgctccccgggaacaacttcaccaatgagtgcaacataccaggcaacttcatgtgcagcaatggacggtgcatcccgggcgcctggcagtgtgacgggctgcctgactgcttcgacaagagtgatgagaaggagtgccccaaggctaagtcgaaatgtggcccaaccttcttcccctgtgccagcggcatccattgcatcattggtcgcttccggtgcaatgggtttgaggactgtcccgatggcagcgatgaagagaactgcacagcaaaccctctgctttgctccaccgcccgctaccactgcaagaacggcctctgtattgacaagagcttcatctgcgatggacagaataactgtcaagacaacagtgatgaggaaagctgtgaaagttctcaagaacccggcagtgggcaggtgtttgtgacttcagagaaccaacttgtgtattaccccagcatcacctatgccatcatcggcagctccgtcatttttgtgctggtggtggccctgctggcactggtcttgcaccaccagcggaagcggaacaacctcatgacgctgcccgtgcaccggctgcagcaccctgtgctgctgtcccgcctggtggtcctggaccacccccaccactgcaacgtcacctacaacgtcaataatggcatccagtatgtggccagccaggcggagcagaatgcgtcggaagtaggctccccaccctcctactccgaggccttgctggaccagaggcctgcgtggtatgaccttcctccaccgccctactcttctgacacggaatctctgaaccaagccgacctgcccccctaccgctcccggtccgggagtgccaacagtgccagctcccaggcagccagcagcctcctgagcgtggaagacaccagccacagcccggggcagcctggcccccaggagggcactgctgagcccagggactctgagcccagccagggcactgaagaagtataagtcccagttattccaaagtccatatgggttaatctgctctgacttgttgccattctaacaatttgtgctcatgggaagctctttaagcacctgtaaggatgtctcaagttacagtttgggatattaactatctctgcattcccctcctcccccagacttcagagatgtttttctggcgtctcagttgacatgatctgttgtgcgtcttttctgtcaggtcactcttcccttgggacccgagatcacaccctcatttttcacattattctgtttctgttggagagacagcatataaaacagtattgaaataggctgggagagagcaatgtttctgtgctatattggatgctcagaagtgcaggagacgctggacccaattctctctgctgggtagttaccttatagcatttggggatttgggttagatgatctaaccaggaggccatcactggatggtcacccccccaaaaaaattccatttgagcatcaaaacctgctttgcacaatcctatttgatgcccccagttcagcagagtcagtggccaaagaaaactttggacgtgagtaacacccttcagcagtcgcaacgttattttggttttgtgaaggactctgaaaccatctaccctgtataaattctggctttagaaatttgcccaagaatgctcattctgagagctttcctcagcagcatatatcatcagcctcatcctaaaataggcagggagcccctcccatgagtttatccaagttctcagctcctaaaatgcaggctgccaagaccctacacctgccctggctctacagccacttacctggtttctggactgtcaccctcccagctgacctgcccgtagccaaggaatgaggacctaacttgagttggcccaaagtctgacctggctgtatgtccctgtggcccacacccagcctgtcttgctcattcatgcagcctcaacactggcctccaaagttcccttaacacttgcaaagtcctttttacctgtgcatttggacttgaggacactggtttctatcacaggtgagagccatgttcaatacctccagcaagctctcctggctccctgcactgtgcacgctcctcttcccaaggtcccaataccagcacctctagttagagttagggtcagggtcaggcctctcccaacatcccagtagtttctcctctgagacacatgggcaagagacaatttggagtcaagattttccatttggatctattttaaatcttttagaaatgcatttgaaacagtgtgtttgttttttcccttctagttaagggactatttatatgtgtataggaaagctgtctctttttttgtttttcctttaacaaggtccaaagaaagatgcaaaaggagatcacacccttgccccgctgagccccgtgataacaagtcactccagactaacctgtgtgccagacatttgtgcattgttgcactttgaggttattatttatcaagttcttgaaggaagcagaaagagggactcctctctccctccgtgtatagtctctatgtttgtgctagtttttcttttttttctctgtgtccagtcagccacagggcccgcctccctgcaggaataaggggtaaaacgttaggtgttgtttggcaagaaaccacactgactgatgaggggtaaaatggaaccaggtagagccactccgggcagctgtcacccattcagaacttctttccgcagctgaagaaatgttcagtaacctgtttgacgctaattaaaacagagcctgcaggaagtggggctaaagtggcattcagtgatcctgttctgtagacttttctttctttttttaaccaaatccaaaggatgttacagaaaagctagccactggtattttgttttgtttaaaaaaaaaaagaaagaaagaaagaaagaaaaacggaaaggaacctagctgcctgtatctttcatttttaaaatagcacttgagttattttctgagtaatccaataaagaacttttgatgacagccagaatgtgttagaactctggctgaacatttcatctcctgtgagtcagaagggctttatttctccctttgatggggccccttcttctttctggtgctctggaagttgtttagaggaaagaattctaattttaattaattgcgcagtgagttaatctcactcgcttttctgcttccaggcatcttaggaaaaacaaatggttttagtagataagggatgcctactaatgcttttttaaaacaaacagggacatttttattatagatttgatttttttaatgaatgtttttaaaaatatataaataggacaccaaagcggcagggttttttttggggggagggggtttgttttccaactcaagatggcacattagtggccagcaatattttttaactcattccaaccaggaagcttttttatacattgcctaaatctacgccaaccagaaaatagtctcatctctttttttctcaaatgagatccgtgttttattttagcattaaattagttacactgtgatgactggcctattacctgactcagctccctctaccttgaaattgacatttttaaaaaatgcaactaagtggttaatagtgtgtgacgctcaaagttaatgtaaactggaaaggttgtgtgtcgttgctttttgtgttttggttaggcttggttttgttttttaatttttatactttctaataaatttgcagtttcattctttctgtttgtgcaaawggwmctamarmaammaaaaacawywttgggggggcttgggcctcggaaaaagtttttaacaccacttcgggtggggcggcggggcccacgtaggtacggcgaccacgcgggcccaaacgggaccccagaaggaaaccctggccaagaaaaaggtggcgagaattctccacaccagaaaaaaacgcgccgggggaaaccgcagagtgttgcgtaaaccacacccgaagagagaactcagaagcacacaagcgggactcaaccaggaggacccaagggaacccgatagagtacg

SEQ ID NO: 171 - protein, 345 aa, Homo sapiens
MWLLGPLCLLLSSAAESQLLPGNNFTNECNIPGNFMCSNGRCIPGAWQCDGLPDCFDKSDEKECPKAKSKCGPTFFPCASGIHCIIGRFRCNGFEDCPDGSDEENCTANPLLCSTARYHCKNGLCIDKSFICDGQNNCQDNSDEESCESSQEPGSGQVFVTSENQLVYYPSITYAIIGSSVIFVLVVALLALVLHHQRKRNNLMTLPVHRLQHPVLLSRLVVLDHPHHCNVTYNVNNGIQYVASQAEQNASEVGSPPSYSEALLDQRPAWYDLPPPPYSSDTESLNQADLPPYRSRSGSANSASSQAASSLLSVEDTSHSPGQPGPQEGTAEPRDSEPSQGTEEV

SEQ ID NO: 172 - DNA, 2479 bp, Homo sapiens
gtcatattgaacattccagatacctatcattactcgatgctgttgataacagcaagatggctttgaactcagggtcaccaccagctattggaccttactatgaaaaccatggataccaaccggaaaacccctatcccgcacagcccactgtggtccccactgtctacgaggtgcatccggctcagtactacccgtcccccgtgccccagtacgccccgagggtcctgacgcaggcttccaaccccgtcgtctgcacgcagcccaaatccccatccgggacagtgtgcacctcaaagactaagaaagcactgtgcatcaccttgaccctggggaccttcctcgtgggagctgcgctggccgctggcctactctggaagttcatgggcagcaagtgctccaactctgggatagagtgcgactcctcaggtacctgcatcaacccctctaactggtgtgatggcgtgtcacactgccccggcggggaggacgagaatcggtgtgttcgcctctacggaccaaacttcatccttcagatgtactcatctcagaggaagtcctggcaccctgtgtgccaagacgactggaacgagaactacgggcgggcggcctgcagggacatgggctataagaataatttttactctagccaaggaatagtggatgacagcggatccaccagctttatgaaactgaacacaagtgccggcaatgtcgatatctataaaaaactgtaccacagtgatgcctgttcttcaaaagcagtggtttctttacgctgtttagcctgcggggtcaacttgaactcaagccgccagagcaggatcgtgggcggtgagagcgcgctcccgggggcctggccctggcaggtcagcctgcacgtccagaacgtccacgtgtgcggaggctccatcatcacccccgagtggatcgtgacagccgcccactgcgtggaaaaacctcttaacaatccatggcattggacggcatttgcggggattttgagacaatctttcatgttctatggagccggataccaagtacaaaaagtgatttctcatccaaattatgactccaagaccaagaacaatgacattgcgctgatgaagctgcagaagcctctgactttcaacgacctagtgaaaccagtgtgtctgcccaacccaggcatgatgctgcagccagaacagctctgctggatttccgggtggggggccaccgaggagaaagggaagacctcagaagtgctgaacgctgccaaggtgcttctcattgagacacagagatgcaacagcagatatgtctatgacaacctgatcacaccagccatgatctgtgccggcttcctgcaggggaacgtcgattcttgccagggtgacagtggagggcctctggtcacttcgaacaacaatatctggtggctgataggggatacaagctggggttctggctgtgccaaagcttacagaccaggagtgtacgggaatgtgatggtattcacggactggatttatcgacaaatgaaggcaaacggctaatccacatggtcttcgtccttgacgtcgttttacaagaaaacaatggggctggttttgcttccccgtgcatgatttactcttagagatgattcagaggtcacttcatttttattaaacagtgaacttgtctggctttggcactctctgccatactgtgcaggctgcagtggctcccctgcccagcctgctctccctaaccccttgtccgcaaggggtgatggccggctggttgtgggcactggcggtcaattgtggaaggaagagggttggaggctgcccccattgagatcttcctgctgagtcctttccaggggccaattttggatgagcatggagctgtcacttctcagctgctggatgacttgagatgaaaaaggagagacatggaaagggagacagccaggtggcacctgcagcggctgccctctggggccacttggtagtgtccccagcctacttcacaaggggattttgctgatgggttcttagagccttagcagccctggatggtggccagaaataaagggaccagcccttcatgggtggtgacgtggtagtcacttgtaaggggaacagaaacatttttgttcttatggggtgagaatatagacagtgcccttggtgcgagggaagcaattgaaaaggaacttgccctgagcactcctggtgcaggtctccacctgcacattgggtggggctcctgggagggagactcagccttcctcctcatcctccctgaccctgctcctagcaccctggagagtgaatgccccttggtccctggcagggcgccaagtttggcaccatgtcggcctcttcaggcctgatagtcattggaaattgaggtccatgggggaaatcaaggatgctcagtttaaggtacactgtttccatgttatgtttctacacattgatggtggtgaccctgagttcaaagccatctt

SEQ ID NO: 173 - protein, 492 aa, Homo sapiens
MALNSGSPPAIGPYYENHGYQPENPYPAQPTVVPTVYEVHPAQYYPSPVPQYAPRVLTQASNPVVCTQPKSPSGTVCTSKTKKALCITLTLGTFLVGAALAAGLLWKFMGSKCSNSGIECDSSGTCINPSNWCDGVSHCPGGEDENRCVRLYGPNFILQMYSSQRKSWHPVCQDDWNENYGRAACRDMGYKNNFYSSQGIVDDSGSTSFMKLNTSAGNVDIYKKLYHSDACSSKAVVSLRCLACGVNLNSSRQSRIVGGESALPGAWPWQVSLHVQNVHVCGGSIITPEWIVTAAHCVEKPLNNPWHWTAFAGILRQSFMFYGAGYQVQKVISHPNYDSKTKNNDIALMKLQKPLTFNDLVKPVCLPNPGMMLQPEQLCWISGWGATEEKGKTSEVLNAAKVLLIETQRCNSRYVYDNLITPAMICAGFLQGNVDSCQGDSGGPLVTSNNNIWWLIGDTSWGSGCAKAYRPGVYGNVMVFTDWIYRQMKANG

SEQ ID NO: 174 - DNA, 3104 bp, Homo sapiens
  modified_base (2539)..(2539): a, c, g, t, unknown or other
  modified_base (2967)..(2967): a, c, g, t, unknown or other
  modified_base (2979)..(2979): a, c, g, t, unknown or other
  modified_base (2989)..(2990): a, c, g, t, unknown or other
  modified_base (2993)..(2994): a, c, g, t, unknown or other
  modified_base (3006)..(3007): a, c, g, t, unknown or other
  modified_base (3015)..(3015): a, c, g, t, unknown or other
  modified_base (3027)..(3029): a, c, g, t, unknown or other
  modified_base (3040)..(3041): a, c, g, t, unknown or other
  modified_base (3054)..(3054): a, c, g, t, unknown or other
cagagaggctgtatttcagtgcagcctgccagacctcttctggaggaagactggacaaagggggtcacacattccttccatacggttgagcctctacctgcctggtgctggtcacagttcagcttcttcatgatggtggatcccaatggcaatgaatccagtgctacatacttcatcctaataggcctccctggtttagaagaggctcagttctggttggccttcccattgtgctccctctaccttattgctgtgctaggtaacttgacaatcatctacattgtgcggactgagcacagcctgcatgagcccatgtatatatttctttgcatgctttcaggcattgacatcctcatctccacctcatccatgcccaaaatgctggccatcttctggttcaattccactaccatccagtttgatgcttgtctgctacagatgtttgccatccactccttatctggcatggaatccacagtgctgctggccatggcttttgaccgctatgtggccatctgtcacccactgcgccatgccacagtacttacgttgcctcgtgtcaccaaaattggtgtggctgctgtggtgcggggggctgcactgatggcaccccttcctgtcttcatcaagcagctgcccttctgccgctccaatatcctttcccattcctactgcctacaccaagatgtcatgaagctggcctgtgatgatatccgggtcaatgtcgtctatggccttatcgtcatcatctccgccattggcctggactcacttctcatctccttctcatatctgcttattcttaagactgtgttgggcttgacacgtgaagcccaggccaaggcatttggcacttgcgtctctcatgtgtgtgctgtgttcatattctatgtacctttcattggattgtccatggtgcatcgctttagcaagcggcgtgactctccactgcccgtcatcttggccaatatctatctgctggttcctcctgtgctcaacccaattgtctatggagtgaagacaaaggagattcgacagcgcatccttcgacttttccatgtggccacacacgcttcagagccctaggtgtcagtgatcaaacttcttttccattcagagtcctctgattcagattttaatgttaacattttggaagacagtattcagaaaaaaaatttccttaataaaaatacaactcagatccttcaaatatgaaactggttggggaatctccattttttcaatattattttcttctttgttttcttgctacatataattattaataccctgactaggttgtggttggagggttattacttttcattttaccatgcagtccaaatctaaactgcttctactgatggtttacagcattctgagataagaatggtacatctagagaacatttgccaaaggcctaagcacagcaaaggaaaataaacacagaatataataaaatgagataatctagcttaaaactataacttcctcttcagaactcccaaccacattggatctcagaaaaatactgtcttcaaaatgacttctacagagaagaaataatttttcctctggacactagcacttaaggggaagattggaagtaaagccttgaaaagagtacatttacctacgttaatgaaagttgacacactgttctgagagttttcacagcatatggaccctgtttttcctatttaattttcttatcaaccctttaattaggcaaagatattattagtaccctcattgtagccatgggaaaattgatgttcagtggggatcagtgaattaaatggggtcatacaagtataaaaattaaaaaaaaaagacttcatgcccaatctcatatgatgtggaagaactgttaaagagaccaacagggtagtgggttagagatttccagagtcttacattttctaraggaggtatttaatttcttctcactcatccagtgttgtatttaggaatttcctggcaacagaactcatggctttaatcccactagctattgcttattgtcctggtccaattgccaattacctgtgtcttggaagaagtgatttctaggttcaccattatggaagattcttattcagaaagtctgcatagggcttatagcaagttatttatttttaaaagttccataggtgtttctgataggcagtgaggttagggagccaccagttatgatgggaagtatggaatggcaggtgttgaagataacattggccttttgagtgtgactcgtagctggaaagtgagggaatcttcaggaccatgctttatttggggctttgtgcagtatggaacagggactttgagaccgggaaagcaatctgacttaggcatgggaatcaggcatttttgcttctgaggggctattaccaagggttaataggtttcatcttcaacaggatatgacaacagtcttaaccaagaaactcaaattacatatactaaaacatgtgatcatatatgtggtaagtttcattttctttttcaatcctcaggttccctgatatggattcctatnacatgctttcatccccttttgtaatggatatcatatttggaaatgcctatttaatacttgtatttgctgctggactgtaagcccatgagggcactgtttattattgaatgtcatctctgttcatcattgactgctctttgctcatcattgaatcccccagcaaagtgcctagaacataatagtgcttatgcttgacaccggttatttttcatcaaacctgattccttctgtgctgaacacatagccaggcaattttccagccttctttgagttgggtattattaaattttagccattacttccaatgtgagtggaagtgacatgtgcaatttttatacctggctcataaaaccctcccatgtgcagcctttcatgttgacattaaatgtgacttgggaagctatgtgttacacagagttaattaaccngaaaggcctggnaattttttgnnaannaaactgtggccnngaggcccncaaccctttttnnnaatttggcaanntcccactttgtantttggtaaggaggccagttggataagtgaaaaataaagtactattgtgtc

SEQ ID NO: 175 - protein, 317 aa, Homo sapiens
MVDPNGNESSATYFILIGLPGLEEAQFWLAFPLCSLYLIAVLGNLTIIYIVRTEHSLHEPMYIFLCMLSGIDILISTSSMPKMLAIFWFNSTTIQFDACLLQMFAIHSLSGMESTVLLAMAFDRYVAICHPLRHATVLTLPRVTKIGVAAVVRGAALMAPLPVFIKQLPFCRSNILSHSYCLHQDVMKLACDDIRVNVVYGLIVIISAIGLDSLLISFSYLLILKTVLGLTREAQAKAFGTCVSHVCAVFIFYVPFIGLSMVHRFSKRRDSPLPVILANIYLLVPPVLNPIVYGVKTKEIRQRILRLFHVATHASEP

SEQ ID NO: 176 - DNA, 2834 bp, Homo sapiens
tcggagcctgcggagggtggtggtggtggtggtggtggccctcgcccgcctcactcatgcctcctcctcctctgctctcgctcaggcgcctcggtggcggttggtcggcggttacgcggctggtggtcgcggcggccggggctcgctctcggggaggccggggcggatctcgcggcgcaggcggcggcggccgaggtggggtcgcgcggcggaggcggctcgagcttcgtgctgcgcgctcgctcttgggctcctcgctgcaggaggagtgtgactatgtgcagatgatcgaggtgcagcacaagcagtgcctggaggaggcccagctggagaatgagacaataggctgcagcaagatgtgggacaacctcacctgctggccagccacccctcggggccaggtagttgtcttggcctgtcccctcatcttcaagctcttctcctccattcaaggccgcaatgtaagccgcagctgcaccgacgaaggctggacgcacctggagcctggcccgtaccccattgcctgtggtttggatgacaaggcagcgagtttggatgagcagcagaccatgttctacggttctgtgaagaccggctacaccattggctacggcctgtccctcgccacccttctggtcgccacagctatcctgagcctgttcaggaagctccactgcacgcggaactacatccacatgcacctcttcatatccttcatcctgagggctgccgctgtcttcatcaaagacttggccctcttcgacagcggggagtcggaccagtgctccgagggctcggtgggctgtaaggcagccatggtctttttccaatattgtgtcatggctaacttcttctggctgctggtggagggcctctacctgtacaccctgcttgccgtctccttcttctctgagcggaagtacttctgggggtacatactcatcggctggggggtacccagcacattcaccatggtgtggaccatcgccaggatccattttgaggattatggtctgctcaggtgctgggacaccatcaactcctcactgtggtggatcataaagggccccatcctcacctccatcttggtaaacttcatcctgtttatttgcatcatccgaatcctgcttcagaaactgcggcccccagatatcaggaagagtgacagcagtccatactcaaggctagccaggtccacactcctgctgatccccctgtttggagtacactacatcatgttcgccttctttccggacaattttaagcctgaagtgaagatggtctttgagctcgtcgtggggtctttccagggttttgtggtggctatcctctactgcttcctcaatggtgaggtgcaggcggagctgaggcggaagtggcggcgctggcacctgcagggcgtcctgggctggaaccccaaataccggcacccgtcgggaggcagcaacggcgccacgtgcagcacgcaggtttccatgctgacccgcgtcagcccaggtgcccgccgctcctccagcttccaagccgaagtctccctggtctgaccaccaggatcccagcccaagcggcccctcccgccccttcccactcgcagcagacgccggggacagaggcctgcccgggcgcgccagccccggccctgggctcggaggctgcccccggccccctggtctctggtccggacactcctagagaacgcagccctagagcctgcctggagcgtttctagcaagtgagagagatgggagctcctctcctggaggatgcaggtggaactcagtcattagactcctcctccaaaggccccctacgccaatcaagggcaaaaagtctacatactttcatcctgactctgccccctgctggctcttctgcccaattggaggaaagcaaccggtggatcctcaaacaacactggtgtgacctgagggcagaaaggttctgcccgggaaggtcaccagcaccaacaccacggtagtgcctgaaatttcaccattgctgtcaagttcctttgggttaagcattaccactcaggcatttgactgaagatgcagctcactaccctattctctctttacgcttagttatcagctttttaaagtgggttattctggagtttttgtttggagagcacacctatcttagtggttccccaccgaagtggactggcccctgggtcagtctggtgggaggacggtgcaacccaaggactgagggactctgaagcctctgggaaatgagaaggcagccaccagcgaatgctaggtctcggactaagcctacctgctctccaagtctcagtggcttcatctgtcaagtgggactctgtcacaccagccattcttatctctctgtgctgtggaagcaacaggaatcaagagactgccctccttgtccacccacctatgtgccaactgttgtaactaggctcagagatgtgcacccatgggctctgacagaaagcagatcctcaccctgctacacatacaggatttgaactcagatctgtctgataggaatgtgaaagcacggactcttactgctaacttttgtgtatcgtaaccagccagatcctcttggttatttgtttaccacttgtattattaatgccattatccctgaattccccttgccaccccaccctccctggagtgtggctgaggaggcctccatctcatgtatcatctggataggagcctgctggtcacagcctcctctgtctgcccttcaccccagtggccactcagcttcctacccacacctctgccagaagatcccctcaggactgcaacaggcttgtgcaacaataaatgttggcttggaaaaaaaaaaaa

SEQ ID NO: 177 - protein, 495 aa, Homo sapiens
MPPPPLLSLRRLGGGWSAVTRLVVAAAGARSRGGRGGSRGAGGGGRGGVARRRRLELRAARSLLGSSLQEECDYVQMIEVQHKQCLEEAQLENETIGCSKMWDNLTCWPATPRGQVVVLACPLIFKLFSSIQGRNVSRSCTDEGWTHLEPGPYPIACGLDDKAASLDEQQTMFYGSVKTGYTIGYGLSLATLLVATAILSLFRKLHCTRNYIHMHLFISFILRAAAVFIKDLALFDSGESDQCSEGSVGCKAAMVFFQYCVMANFFWLLVEGLYLYTLLAVSFFSERKYFWGYILIGWGVPSTFTMVWTIARIHFEDYGLLRCWDTINSSLWWIIKGPILTSILVNFILFICIIRILLQKLRPPDIRKSDSSPYSRLARSTLLLIPLFGVHYIMFAFFPDNFKPEVKMVFELVVGSFQGFVVAILYCFLNGEVQAELRRKWRRWHLQGVLGWNPKYRHPSGGSNGATCSTQVSMLTRVSPGARRSSSFQAEVSLV

SEQ ID NO: 178 - DNA, 2070 bp, Homo sapiens
atgagcggtgcgggggtggcggctgggacgcggccccccagctcgccgaccccgggctctcggcgccggcgccagcgcccctctgtgggcgtccagtccttgaggccgcagagcccgcagctcaggcagagcgacccgcagaaacggaacctggacctggagaaaagcctgcagttcctgcagcagcagcactcggagatgctggccaagctccatgaggagatcgagcatctgaagcgggaaaacaagggtgagccggcgcggggccctaggccggccctgcctccccaggcacactcaacactgccgctcccgcagcacagaaacacagccatcaactccagcacacgcctgggctcagggggaacacaggacggggagcccctccagactgtccttgcccacctggctgcactggcccctgtatgccaacccagtgggtacaggttctgggggacctggacagatgccgctacctctagccgtggctggacgatgttatgcagccaagcacagcacgtgctgctctcgggaagcccagggcctgaggtcattgcagggcggcaggtggccacagggtgctccccagacctccctcctccaagtagagctgaaatgggaaggaacccctgggacagcccctgccctgctagatctttgcctcagattgctgctgtggccaggcccaggatttccagccctatggctctgagtcctcacatgctgggggcccaggggatatggacacactccatccagggatcccttcctgccatctgggcagcaaccatggggacaaagggaggaagcagagtcctgtttccttgccacttgtccaaggcacttccccatcctgacagcggcccccacccagcccaggatcctgggctgtggtctcaagctcacttcccattatctttggggctggggctgacatcaggaggacatctgactggtggatggagccagcctgggaacatcgcagctggggcagtgcctagggctctcccttcccagggagacatggagaagggggttgagggagggcccttccctagccgctgtggcaactccagtgagctgttctgggcaaagtgtggcccaagtcggcagccccagccctgcagtgctggggacgctgacaggacacgggaagaggccatgctttccctcgggacctgctgttccatgtgtcccaagccctcctgctttccagatggcccctcaggaaaccacctttccagggcctctgctcccttgggcgctcgctgggtctgcatcaacggagtgtgggtagagccgggaggacccagccctgccaggctgaaggagggctcctcacggacacacaggccaggaggcaagcgtgggcgtcttgcgggcggtagcgccgacactgtgcgctctcctgcagacagcctctccatgtcaagcttccagtctgtcaagtccatctctaattcagccaactctcaaggcaaggccaggccccagcccggctccttcaacaagcaagattcaaaagctgacgtctcccagaaggcggacctggaagaggagcccctacttcacaacagcaagctggacaaagttcctggggtacaagggcaggccagaaaggagaaagcagaggcctctaatgcaggagctgcctgtatggggaacagccagcaccagggcaggcagatgggggcgggggcacaccccccaatgatcctgccccttcccctgcgaaagcccaccacacttaggcagtgcgaagtgctcatccgcgagctgtggaataccaacctcctgcagacccaagagctgcggcacctcaagtccctcctggaagggagccagaggccccaggcagccccggaggaagctagctttcccagggaccaagaagccacgcatttccccaaggtctccaccaagagcctctccaagaaatgcctgagcccacctgtggcggagcgtgccatcctgcccgcactgaagcagaccccgaagaacaactttgccgagaggcagaagaggctgcaggcaatgcagaaacggcgcctgcatcgctcagtgctttga

SEQ ID NO: 179 - protein, 689 aa, Homo sapiens [sequence omitted]

SEQ ID NO: 180 - DNA, 3461 bp, Homo sapiens
ctcgtgccgaattcggcacgagaccgcgtgttcgcgcctggtagagatttctcgaagacaccagtgggcccgtgtggaaccaaacctgcgcgcgtggccgggccgtgggacaacgaggccgcggagacgaaggcgcaatggcgaggaagttatctgtaatcttgatcctgacctttgccctctctgtcacaaatccccttcatgaactaaaagcagctgctttcccccagaccactgagaaaattagtccgaattgggaatctggcattaatgttgacttggcaatttccacacggcaatatcatctacaacagcttttctaccgctatggagaaaataattctttgtcagttgaagggttcagaaaattacttcaaaatataggcatagataagattaaaagaatccatatacaccatgaccacgaccatcactcagaccacgagcatcactcagaccatgagcgtcactcagaccatgagcatcactcagaccacgagcatcactctgaccatgatcatcactctcaccataatcatgctgcttctggtaaaaataagcgaaaagctctttgcccagaccatgactcagatagttcaggtaaagatcctagaaacagccaggggaaaggagctcaccgaccagaacatgccagtggtagaaggaatgtcaaggacagtgttagtgctagtgaagtgacctcaactgtgtacaacactgtctctgaaggaactcactttctagagacaatagagactccaagacctggaaaactcttccccaaagatgtaagcagctccactccacccagtgtcacatcaaagagccgggtgagccggctggctggtaggaaaacaaatgaatctgtgagtgagccccgaaaaggctttatgtattccagaaacacaaatgaaaatcctcaggagtgtttcaatgcatcaaagctactgacatctcatggcatgggcatccaggttccgctgaatgcaacagagttcaactatctctgtccagccatcatcaaccaaattgatgctagatcttgtctgattcatacaagtgaaaagaaggctgaaatccctccaaagacctattcattacaaatagcctgggttggtggttttatagccatttccatcatcagtttcctgtctctgctgggggttatcttagtgcctctcatgaatcgggtgtttttcaaatttctcctgagtttccttgtggcactggccgttgggactttgagtggtgatgcttttttacaccttcttccacattctcatgcaagtcaccaccatagtcatagccatgaagaaccagcaatggaaatgaaaagaggaccacttttcagtcatctgtcttctcaaaacatagaagaaagtgcctattttgattccacgtggaagggtctaacagctctaggaggcctgtatttcatgtttcttgttgaacatgtcctcacattgatcaaacaatttaaagataagaagaaaaagaatcagaagaaacctgaaaatgatgatgatgtggagattaagaagcagttgtccaagtatgaatctcaactttcaacaaatgaggagaaagtagatacagatgatcgaactgaaggctatttacgagcagactcacaagagccctcccactttgattctcagcagcctgcagtcttggaagaagaagaggtcatgatagctcatgctcatccacaggaagtctacaatgaatatgtacccagagggtgcaagaataaatgccattcacatttccacgatacactcggccagtcagacgatctcattcaccaccatcatgactaccatcatattctccatcatcaccaccaccaaaaccaccatcctcacagtcacagccagcgctactctcgggaggagctgaaagatgccggcgtcgccactttggcctggatggtgataatgggtgatggcctgcacaatttcagcgatggcctagcaattggtgctgcttttactgaaggcttatcaagtggtttaagtacttctgttgctgtgttctgtcatgagttgcctcatgaattaggtgactttgctgttctactaaaggctggcatgaccgttaagcaggctgtcctttataatgcattgtcagccatgctggcgtatcttggaatggcaacaggaattttcattggtcattatgctgaaaatgtttctatgtggatatttgcacttactgctggcttattcatgtatgttgctctggttgatatggtacctgaaatgctgcacaatgatgctagtgaccatggatgtagccgctgggggtatttctttttacagaatgctgggatgcttttgggttttggaattatgttacttatttccatatttgaacataaaatcgtgtttcgtataaatttctagttaaggtttaaatgctagagtagcttaaaaagttgtcatagtttcagtaggtcatagggagatgagtttgtatgctgtactatgcagcgtttaaagttagtgggttttgtgatttttgtattgaatattgctgtctgttacaaagtcagttaaaggtacgttttaatatttaagttattctatcttggagataaaatctgtatgtgcaattcaccggtattaccagtttattatgtaaacaagagatttggcatgacatgttctgtatgtttcagggaaaaatgtctttaatgctttttcaagaactaacacagttattcctatactggattttaggtctctgaagaactgctggtgtttaggaataagaatgtgcatgaagcctaaaataccaagaaagcttatactgaatttaagcaaagaaataaaggagaaaagagaagaatctgagaattggggaggcatagattcttataaaaatcacaaaatttgttgtaaattagaggggagaaatttagaattaagtataaaaaggcagaattagtatagagtacattcattaaacatttttgtcaggattatttcccgtaaaaacgtagtgagcactctcatatactaattagtgtacatttaactttgtataatacagaaatctaaatatatttaatgaattcaagcaatatacacttgaccaagaaattggaatttcaaaatgttcgtgcgggttatataccagatgagtacagtgagtagtttatgtatcaccagactgggttattgccaagttatatatcaccaaaagctgtatgactggatgttctggttacctggtttacaaaattatcagagtagtaaaactttgatatatatgaggatattaaaactacactaagtatcatttgattcgattcagaaagtactttgatatctctcagtgcttcagtgctatcattgtgagcaattgtctttatatacggtactgtagccatactaggcctgtctgtggcattctctagatgtttcttttttacacaataaattccttatatcagcttg

SEQ ID NO: 181 - protein, 755 aa, Homo sapiens
MARKLSVILILTFALSVTNPLHELKAAAFPQTTEKISPNWESGINVDLAISTRQYHLQQLFYRYGENNSLSVEGFRKLLQNIGIDKIKRIHIHHDHDHHSDHEHHSDHERHSDHEHHSDHEHHSDHDHHSHHNHAASGKNKRKALCPDHDSDSSGKDPRNSQGKGAHRPEHASGRRNVKDSVSASEVTSTVYNTVSEGTHFLETIETPRPGKLFPKDVSSSTPPSVTSKSRVSRLAGRKTNESVSEPRKGFMYSRNTNENPQECFNASKLLTSHGMGIQVPLNATEFNYLCPAIINQIDARSCLIHTSEKKAEIPPKTYSLQIAWVGGFIAISIISFLSLLGVILVPLMNRVFFKFLLSFLVALAVGTLSGDAFLHLLPHSHASHHHSHSHEEPAMEMKRGPLFSHLSSQNIEESAYFDSTWKGLTALGGLYFMFLVEHVLTLIKQFKDKKKKNQKKPENDDDVEIKKQLSKYESQLSTNEEKVDTDDRTEGYLRADSQEPSHFDSQQPAVLEEEEVMIAHAHPQEVYNEYVPRGCKNKCHSHFHDTLGQSDDLIHHHHDYHHILHHHHHQNHHPHSHSQRYSREELKDAGVATLAWMVIMGDGLHNFSDGLAIGAAFTEGLSSGLSTSVAVFCHELPHELGDFAVLLKAGMTVKQAVLYNALSAMLAYLGMATGIFIGHYAENVSMWIFALTAGLFMYVALVDMVPEMLHNDASDHGCSRWGYFFLQNAGMLLGFGIMLLISIFEHKIVFRINF

SEQ ID NO: 182 - DNA, 2032 bp, Homo sapiens
cgcggggcgcggagtcggcggggcctcgcgggacgcgggcagtgcggagaccgcggcgctgaggacgcgggagccgggagcgcacgcgcggggtggagttcagcctactctttcttagatgtgaaaggaaaggaagatcatttcatgccttgttgataaaggttcagacttctgctgattcataaccatttggctctgagctatgacaagagaggaaacaaaaagttaaacttacaagcctgccataagtgagaagcaaacttccttgataacatgcttttgcgaagtgcaggaaaattaaatgtgggcaccaagaaagaggatggtgagagtacagcccccaccccccgtccaaaggtcttgcgttgtaaatgccaccaccattgtccagaagactcagtcaacaatatttgcagcacagacggatattgtttcacgatgatagaagaggatgactctgggttgcctgtggtcacttctggttgcctaggactagaaggctcagattttcagtgtcgggacactcccattcctcatcaaagaagatcaattgaatgctgcacagaaaggaacgaatgtaataaagacctacaccctacactgcctccattgaaaaacagagattttgttgatggacctatacaccacagggctttacttatatctgtgactgtctgtagtttgctcttggtccttatcatattattttgttacttccggtataaaagacaagaaaccagacctcgatacagcattgggttagaacaggatgaaacttacattcctcctggagaatccctgagagacttaattgagcagtctcagagctcaggaagtggatcaggcctccctctgctggtccaaaggactatagctaagcagattcagatggtgaaacagattggaaaaggtcgctatggggaagtttggatgggaaagtggcgtggcgaaaaggtagctgtgaaagtgttcttcaccacagaggaagccagctggttcagagagacagaaatatatcagacagtgttgatgaggcatgaaaacattttgggtttcattgctgcagatatcaaagggacagggtcctggacccagttgtacctaatcacagactatcatgaaaatggttccctttatgattatctgaagtccaccaccctagacgctaaatcaatgctgaagttagcctactcttctgtcagtggcttatgtcatttacacacagaaatctttagtactcaaggcaaaccagcaattgcccatcgagatctgaaaagtaaaaacattctggtgaagaaaaatggaacttgctgtattgctgacctgggcctggctgttaaatttattagtgatacaaatgaagttgacataccacctaacactcgagttggcaccaaacgctatatgcctccagaagtgttggacgagagcttgaacagaaatcacttccagtcttacatcatggctgacatgtatagttttggcctcatcctttgggaggttgctaggagatgtgtatcaggaggtatagtggaagaataccagcttccttatcatgacctagtgcccagtgacccctcttatgaggacatgagggagattgtgtgcatcaagaagttacgcccctcattcccaaaccggtggagcagtgatgagtgtctaaggcagatgggaaaactcatgacagaatgctgggctcacaatcctgcatcaaggctgacagccctgcgggttaagaaaacacttgccaaaatgtcagagtcccaggacattaaactctgataggagaggaaaagtaagcatctctgcagaaagccaacaggtactcttctgtttgtgggcagagcaaaagacatcaaataagcatccacagtacaagccttgaacatcgtcctgcttcccagtgggttcagacctcacctttcagggagcgacctgggcaaagacagagaagctcccagaaggagagattgatccgtgtctgtttgtaggcggagaaaccgttgggtaacttgttcaagatatgatgcat

SEQ ID NO: 183 - protein, 502 aa, Homo sapiens
MLLRSAGKLNVGTKKEDGESTAPTPRPKVLRCKCHHHCPEDSVNNICSTDGYCFTMIEEDDSGLPVVTSGCLGLEGSDFQCRDTPIPHQRRSIECCTERNECNKDLHPTLPPLKNRDFVDGPIHHRALLISVTVCSLLLVLIILFCYFRYKRQETRPRYSIGLEQDETYIPPGESLRDLIEQSQSSGSGSGLPLLVQRTIAKQIQMVKQIGKGRYGEVWMGKWRGEKVAVKVFFTTEEASWFRETEIYQTVLMRHENILGFIAADIKGTGSWTQLYLITDYHENGSLYDYLKSTTLDAKSMLKLAYSSVSGLCHLHTEIFSTQGKPAIAHRDLKSKNILVKKNGTCCIADLGLAVKFISDTNEVDIPPNTRVGTKRYMPPEVLDESLNRNHFQSYIMADMYSFGLILWEVARRCVSGGIVEEYQLPYHDLVPSDPSYEDMREIVCIKKLRPSFPNRWSSDECLRQMGKLMTECWAHNPASRLTALRVKKTLAKMSESQDIKL

SEQ ID NO: 184 - DNA, 3375 bp, Homo sapiens
gacagtgttcgcggctgcaccgctcggaggctgggtgacccgcgtagaagtgaagtacttttttatttgcagacctgggccgatgccgctttaaaaaacgcgaggggctctatgcacctccctggcggtagttcctccgacctcagccgggtcgggtcgtgccgccctctcccaggagagacaaacaggtgtcccacgtggcagccgcgccccgggcgcccctcctgtgatcccgtagcgccccctggcccgagccgcgcccgggtctgtgagtagagccgcccgggcaccgagcgctggtcgccgctctccttccgttatatcaacatgccccctttcctgttgctggaggccgtctgtgttttcctgttttccagagtgcccccatctctccctctccaggaagtccatgtaagcaaagaaaccatcgggaagatttcagctgccagcaaaatgatgtggtgctcggctgcagtggacatcatgtttctgttagatgggtctaacagcgtcgggaaagggagctttgaaaggtccaagcactttgccatcacagtctgtgacggtctggacatcagccccgagagggtcagagtgggagcattccagttcagttccactcctcatctggaattccccttggattcattttcaacccaacaggaagtgaaggcaagaatcaagaggatggttttcaaaggagggcgcacggagacggaacttgctctgaaataccttctgcacagagggttgcctggaggcagaaatgcttctgtgccccagatcctcatcatcgtcactgatgggaagtcccagggggatgtggcactgccatccaagcagctgaaggaaaggggtgtcactgtgtttgctgtgggggtcaggtttcccaggtgggaggagctgcatgcactggccagcgagcctagagggcagcacgtgctgttggctgagcaggtggaggatgccaccaacggcctcttcagcaccctcagcagctcggccatctgctccagcgccacgccagactgcagggtcgaggctcacccctgtgagcacaggacgctggagatggtccgggagttcgctggcaatgccccatgctggagaggatcgcggcggacccttgcggtgctggctgcacactgtcccttctacagctggaagagagtgttcctaacccaccctgccacctgctacaggaccacctgcccaggcccctgtgactcgcagccctgccagaatggaggcacatgtgttccagaaggactggacggctaccagtgcctctgcccgctggcctttggaggggaggctaactgtgccctgaagctgagcctggaatgcagggtcgacctcctcttcctgctggacagctctgcgggcaccactctggacggcttcctgcgggccaaagtcttcgtgaagcggtttgtgcgggccgtgctgagcgaggactctcgggcccgagtgggtgtggccacatacagcagggagctgctggtggcggtgcctgtgggggagtaccaggatgtgcctgacctggtctggagcctcgatggcattcccttccgtggtggccccaccctgacgggcagtgccttgcggcaggcggcagagcgtggcttcgggagcgccaccaggacaggccaggaccggccacgtagagtggtggttttgctcactgagtcacactccgaggatgaggttgcgggcccagcgcgtcacgcaagggcgcgagagctgctcctgctgggtgtaggcagtgaggccgtgcgggcagagctggaggagatcacaggcagcccaaagcatgtgatggtctactcggatcctcaggatctgttcaaccaaatccctgagctgcaggggaagctgtgcagccggcagcggccagggtgccggacacaagccctggacctcgtcttcatgttggacacctctgcctcagtagggcccgagaattttgctcagatgcagagctttgtgagaagctgtgccctccagtttgaggtgaaccctgacgtgacacaggtcggcctggtggtgtatggcagccaggtgcagactgccttcgggctggacaccaaacccacccgggctgcgatgctgcgggccattagccaggccccctacctaggtggggtgggctcagccggcaccgccctgctgcacatctatgacaaagtgatgaccgtccagaggggtgcccggcctggtgtccccaaagctgtggtggtgctcacaggcgggagaggcgcagaggatgcagccgttcctgcccagaagctgaggaacaatggcatctctgtcttggtcgtgggcgtggggcctgtcctaagtgagggtctgcggaggcttgcaggtccccgggattccctgatccacgtggcagcttacgccgacctgcggtaccaccaggacgtgctcattgagtggctgtgtggagaagccaagcagccagtcaacctctgcaaacccagcccgtgcatgaatgagggcagctgcgtcctgcagaatgggagctaccgctgcaagtgtcgggatggctgggagggcccccactgcgagaaccgtgagtggagctcttgctctgtatgtgtgagccagggatggattcttgagacgcccctgaggcacatggctcccgtgcaggagggcagcagccgtacccctcccagcaactacagagaaggcctgggcactgaaatggtgcctaccttctggaatgtctgtgccccaggtccttagaatgtctgcttcccgccgtggccaggaccactattctcactgagggaggaggatgtcccaactgcagccatgctgcttagagacaagaaagcagctgatgtcacccacaaacgatgttgttgaaaagttttgatgtgtaagtaaatacccactttctgtacctgctgtgccttgttgaggctatgtcatctgccacctttcccttgaggataaacaaggggtcctgaagacttaaatttagcggcctgacgttcctttgcacacaatcaatgctcgccagaatgttgttgacacagtaatgcccagcagaggcctttactagagcatcctttggacggcgaaggccacggcctttcaagatggaaagcagcagcttttccacttccccagagacattctggatgcatttgcattgagtctgaaagggggcttgagggacgtttgtgacttcttggcgactgccttttgtgtgtggaagagacttggaaaggtctcagactgaatgtgaccaattaaccagcttggttgatgatgggggaggggctgagttgtgcatgggcccaggtctggagggccacgtaaaatcgttctgagtcgtgagcagtgtccaccttgaaggtcttc

SEQ ID NO: 185 - protein, 807 aa, Homo sapiens
MPPFLLLEAVCVFLFSRVPPSLPLQEVHVSKETIGKISAASKMMWCSAAVDIMFLLDGSNSVGKGSFERSKHFAITVCDGLDISPERVRVGAFQFSSTPHLEFPLDSFSTQQEVKARIKRMVFKGGRTETELALKYLLHRGLPGGRNASVPQILIIVTDGKSQGDVALPSKQLKERGVTVFAVGVRFPRWEELHALASEPRGQHVLLAEQVEDATNGLFSTLSSSAICSSATPDCRVEAHPCEHRTLEMVREFAGNAPCWRGSRRTLAVLAAHCPFYSWKRVFLTHPATCYRTTCPGPCDSQPCQNGGTCVPEGLDGYQCLCPLAFGGEANCALKLSLECRVDLLFLLDSSAGTTLDGFLRAKVFVKRFVRAVLSEDSRARVGVATYSRELLVAVPVGEYQDVPDLVWSLDGIPFRGGPTLTGSALRQAAERGFGSATRTGQDRPRRVVVLLTESHSEDEVAGPARHARARELLLLGVGSEAVRAELEEITGSPKHVMVYSDPQDLFNQIPELQGKLCSRQRPGCRTQALDLVFMLDTSASVGPENFAQMQSFVRSCALQFEVNPDVTQVGLVVYGSQVQTAFGLDTKPTRAAMLRAISQAPYLGGVGSAGTALLHIYDKVMTVQRGARPGVPKAVVVLTGGRGAEDAAVPAQKLRNNGISVLVVGVGPVLSEGLRRLAGPRDSLIHVAAYADLRYHQDVLIEWLCGEAKQPVNLCKPSPCMNEGSCVLQNGSYRCKCRDGWEGPHCENREWSSCSVCVSQGWILETPLRHMAPVQEGSSRTPPSNYREGLGTEMVPTFWNVCAPGP

SEQ ID NO: 186 - DNA, 1723 bp, Homo sapiens
tgctacccgcgcccgggcttctggggtgttccccaaccacggcccagccctgccacaccccccgcccccggcctccgcagctcggcatgggcgcgggggtgctcgtcctgggcgcctccgagcccggtaacctgtcgtcggccgcaccgctccccgacggcgcggccaccgcggcgcggctgctggtgcccgcgtcgccgcccgcctcgttgctgcctcccgccagcgaaagccccgagccgctgtctcagcagtggacagcgggcatgggtctgctgatggcgctcatcgtgctgctcatcgtggcgggcaatgtgctggtgatcgtggccatcgccaagacgccgcggctgcagacgctcaccaacctcttcatcatgtccctggccagcgccgacctggtcatggggctgctggtggtgccgttcggggccaccatcgtggtgtggggccgctgggagtacggctccttcttctgcgagctgtggacctcagtggacgtgctgtgcgtgacggccagcatcgagaccctgtgtgtcattgccctggaccgctacctcgccatcacctcgcccttccgctaccagagcctgctgacgcgcgcgcgggcgcggggcctcgtgtgcaccgtgtgggccatctcggccctggtgtccttcctgcccatcctcatgcactggtggcgggcggagagcgacgaggcgcgccgctgctacaacgaccccaagtgctgcgacttcgtcaccaaccgggcctacgccatcgcctcgtccgtagtctccttctacgtgcccctgtgcatcatggccttcgtgtacctgcgggtgttccgcgaggcccagaagcaggtgaagaagatcgacagctgcgagcgccgtttcctcggcggcccagcgcggccgccctcgccctcgccctcgcccgtccccgcgcccgcgccgccgcccggacccccgcgccccgccgccgccgccgccaccgccccgctggccaacgggcgtgcgggtaagcggcggccctcgcgcctcgtggccctacgcgagcagaaggcgctcaagacgctgggcatcatcatgggcgtcttcacgctctgctggctgcccttcttcctggccaacgtggtgaaggccttccaccgcgagctggtgcccgaccgcctcttcgtcttcttcaactggctgggctacgccaactcggccttcaaccccatcatctactgccgcagccccgacttccgcaaggccttccagggactgctctgctgcgcgcgcagggctgcccgccggcgccacgcgacccacggagaccggccgcgcgcctcgggctgtctggcccggcccggacccccgccatcgcccggggccgcctcggacgacgacgacgacgatgtcgtcggggccacgccgcccgcgcgcctgctggagccctgggccggctgcaacggcggggcggcggcggacagcgactcgagcctggacgagccgtgccgccccggcttcgcctcggaatccaaggtgtagggcccggcgcggggcgcggactccgggcacggcttcccaggggaacgaggagatctgtgtttacttaagaccgatagcaggtgaactcgaagcccacaatcctcgtctgaatcatccgaggcaaagagaaaagccacggaccgttgcacaaaaaggaaagtttgggaagggatgggagagtggcttgctgatgttccttgttg

SEQ ID NO: 187 - protein, 477 aa, Homo sapiens
MGAGVLVLGASEPGNLSSAAPLPDGAATAARLLVPASPPASLLPPASESPEPLSQQWTAGMGLLMALIVLLIVAGNVLVIVAIAKTPRLQTLTNLFIMSLASADLVMGLLVVPFGATIVVWGRWEYGSFFCELWTSVDVLCVTASIETLCVIALDRYLAITSPFRYQSLLTRARARGLVCTVWAISALVSFLPILMHWWRAESDEARRCYNDPKCCDFVTNRAYAIASSVVSFYVPLCIMAFVYLRVFREAQKQVKKIDSCERRFLGGPARPPSPSPSPVPAPAPPPGPPRPAAAAATAPLANGRAGKRRPSRLVALREQKALKTLGIIMGVFTLCWLPFFLANVVKAFHRELVPDRLFVFFNWLGYANSAFNPIIYCRSPDFRKAFQGLLCCARRAARRRHATHGDRPRASGCLARPGPPPSPGAASDDDDDDVVGATPPARLLEPWAGCNGGAAADSDSSLDEPCRPGFASESKV

SEQ ID NO: 188 - DNA, 3737 bp, Homo sapiens
ggcgtccgcgcacacctccccgcgccgccgccgccaccgcccgcactccgccgcctctgcccgcaaccgctgagccatccatgggggtcgcgggccgcaaccgtcccggggcggcctgggcggtgctgctgctgctgctgctgctgccgccactgctgctgctggcgggggccgtcccgccgggtcggggccgtgccgcggggccgcaggaggatgtagatgagtgtgcccaagggctagatgactgccatgccgacgccctgtgtcagaacacacccacctcctacaagtgctcctgcaagcctggctaccaaggggaaggcaggcagtgtgaggacatcgatgaatgtggaaatgagctcaatggaggctgtgtccatgactgtttgaatattccaggcaattatcgttgcacttgttttgatggcttcatgttggctcatgacggtcataattgtcttgatgtggacgagtgcctggagaacaatggcggctgccagcatacctgtgtcaacgtcatggggagctatgagtgctgctgcaaggaggggtttttcctgagtgacaatcagcacacctgcattcaccgctcggaagagggcctgagctgcatgaataaggatcacggctgtagtcacatctgcaaggaggccccaaggggcagcgtcgcctgtgagtgcaggcctggttttgagctggccaagaaccagagagactgcatcttgacctgtaaccatgggaacggtgggtgccagcactcctgtgacgatacagccgatggcccagagtgcagctgccatccacagtacaagatgcacacagatgggaggagctgccttgagcgagaggacactgtcctggaggtgacagagagcaacaccacatcagtggtggatggggataaacgggtgaaacggcggctgctcatggaaacgtgtgctgtcaacaatggaggctgtgaccgcacctgtaaggatacttcgacaggtgtccactgcagttgtcctgttggattcactctccagttggatgggaagacatgtaaagatattgatgagtgccagacccgcaatggaggttgtgatcatttctgcaaaaacatcgtgggcagttttgactgcggctgcaagaaaggatttaaattattaacagatgagaagtcttgccaagatgtggatgagtgctctttggataggacctgtgaccacagctgcatcaaccaccctggcacatttgcttgtgcttgcaaccgagggtacaccctgtatggcttcacccactgtggagacaccaatgagtgcagcatcaacaacggaggctgtcagcaggtctgtgtgaacacagtgggcagctatgaatgccagtgccaccctgggtacaagctccactggaataaaaaagactgtgtggaagtgaaggggctcctgcccacaagtgtgtcaccccgtgtgtccctgcactgcggtaagagtggtggaggagacgggtgcttcctcagatgtcactctggcattcacctctcttcagatgtcaccaccatcaggacaagtgtaacctttaagctaaatgaaggcaagtgtagtttgaaaaatgctgagctgtttcccgagggtctgcgaccagcactaccagagaagcacagctcagtaaaagagagcttccgctacgtaaaccttacatgcagctctggcaagcaagtcccaggagcccctggccgaccaagcacccctaaggaaatgtttatcactgttgagtttgagcttgaaactaaccaaaaggaggtgacagcttcttgtgacctgagctgcatcgtaaagcgaaccgagaagcggctccgtaaagccatccgcacgctcagaaaggccgtccacagggagcagtttcacctccagctctcaggcatgaacctcgacgtggctaaaaagcctcccagaacatctgaacgccaggcagagtcctgtggagtgggccagggtcatgcagaaaaccaatgtgtcagttgcagggctgggacctattatgatggagcacgagaacgctgcattttatgtccaaatggaaccttccaaaatgaggaaggacaaatgacttgtgaaccatgcccaagaccaggaaattctggggccctgaagaccccagaagcttggaatatgtctgaatgtggaggtctgtgtcaacctggtgaatattctgcagatggctttgcaccttgccagctctgtgccctgggcacgttccagcctgaagctggtcgaacttcctgcttcccctgtggaggaggccttgccaccaaacatcagggagctacttcctttcaggactgtgaaaccagagttcaatgttcacctggacatttctacaacaccaccactcaccgatgtattcgttgcccagtgggaacataccagcctgaatttggaaaaaataattgtgtttcttgcccaggaaatactacgactgactttgatggctccacaaacataacccagtgtaaaaacagaagatgtggaggggagctgggagatttcactgggtacattgaatccccaaactacccaggcaattacccagccaacaccgagtgtacgtggaccatcaacccaccccccaagcgccgcatcctgatcgtggtccctgagatcttcctgcccatagaggacgactgtggggactatctggtgatgcggaaaacctcttcatccaattctgtgacaacatatgaaacctgccagacctacgaacgccccatcgccttcacctccaggtcaaagaagctgtggattcagttcaagtccaatgaagggaacagcgctagagggttccaggtcccatacgtgacatatgatgaggactaccaggaactcattgaagacatagttcgagatggcaggctctatgcatctgagaaccatcaggaaatacttaaggataagaaacttatcaaggctctgtttgatgtcctggcccatccccagaactatttcaagtacacagcccaggagtcccgagagatgtttccaagatcgttcatccgattgctacgttccaaagtgtccaggtttttgagaccttacaaatgactcagcccacgtgccactcaatacaaatgttctgctatagggttggtgggacagagctgtcttccttctgcatgtcagcacagtcgggtattgctgcctcccgtatcagtgactcattagagttcaatttttatagataatacagatattttggtaaattgaacttggtttttctttcccagcatcgtggatgtagactgagaatggctttgagtggcatcagcttctcactgctgtgggcggatgtcttggatagatcacgggctggctgagctggactttggtcagcctaggtgagactcacctgtccttctggggtcttactcctcctcaaggagtctgtagtggaaaggaggccacagaataagctgcttattctgaaacttcagcttcctctagcccggccctctctaagggagccctctgcactcgtgtgcaggctctgaccaggcagaacaggcaagaggggagggaaggagacccctgcaggctccctccacccaccttgagacctgggaggactcagtttctccacagccttctccagcctgtgtgatacaagtttgatcccaggaacttgagttctaagcagtgctcgtgaaaaaaaaaagcagaaagaattagaaataaataaaaactaagcacttctggagacat

SEQ ID NO: 189 - protein, 999 aa, Homo sapiens
MGVAGRNRPGAAWAVLLLLLLLPPLLLLAGAVPPGRGRAAGPQEDVDECAQGLDDCHADALCQNTPTSYKCSCKPGYQGEGRQCEDIDECGNELNGGCVHDCLNIPGNYRCTCFDGFMLAHDGHNCLDVDECLENNGGCQHTCVNVMGSYECCCKEGFFLSDNQHTCIHRSEEGLSCMNKDHGCSHICKEAPRGSVACECRPGFELAKNQRDCILTCNHGNGGCQHSCDDTADGPECSCHPQYKMHTDGRSCLEREDTVLEVTESNTTSVVDGDKRVKRRLLMETCAVNNGGCDRTCKDTSTGVHCSCPVGFTLQLDGKTCKDIDECQTRNGGCDHFCKNIVGSFDCGCKKGFKLLTDEKSCQDVDECSLDRTCDHSCINHPGTFACACNRGYTLYGFTHCGDTNECSINNGGCQQVCVNTVGSYECQCHPGYKLHWNKKDCVEVKGLLPTSVSPRVSLHCGKSGGGDGCFLRCHSGIHLSSDVTTIRTSVTFKLNEGKCSLKNAELFPEGLRPALPEKHSSVKESFRYVNLTCSSGKQVPGAPGRPSTPKEMFITVEFELETNQKEVTASCDLSCIVKRTEKRLRKAIRTLRKAVHREQFHLQLSGMNLDVAKKPPRTSERQAESCGVGQGHAENQCVSCRAGTYYDGARERCILCPNGTFQNEEGQMTCEPCPRPGNSGALKTPEAWNMSECGGLCQPGEYSADGFAPCQLCALGTFQPEAGRTSCFPCGGGLATKHQGATSFQDCETRVQCSPGHFYNTTTHRCIRCPVGTYQPEFGKNNCVSCPGNTTTDFDGSTNITQCKNRRCGGELGDFTGYIESPNYPGNYPANTECTWTINPPPKRRILIVVPEIFLPIEDDCGDYLVMRKTSSSNSVTTYETCQTYERPIAFTSRSKKLWIQFKSNEGNSARGFQVPYVTYDEDYQELIEDIVRDGRLYASENHQEILKDKKLIKALFDVLAHPQNYFKYTAQESREMFPRSFIRLLRSKVSRFLRPYK

SEQ ID NO: 190 - DNA, 2642 bp, Homo sapiens
aaggaggcggcctccgggaaaagcgaccgcaggactcctgagagcagcctccatgaggccctggaccagtgcatgaccgccctggacctcttcctcaccaaccagttctcagaagcactcagctacctcaagcccagaaccaaggaaagcatgtaccactcactgacatatgccaccatcctggagatgcaggccatgatgacctttgaccctcaggacatcctgcttgccggcaacatgatgaaggaggcacagatgctgtgtcagaggcaccggaggaagtcttctgtaacagattccttcagcagcctggtgaaccgccccacgctgggccaattcactgaagaagaaatccacgctgaggtctgctatgcagagtgcctgctgcagcgagcagccctgaccttcctgcaggacgagaacatggtgagcttcatcaaaggcggcatcaaagttcgaaacagctaccagacctacaaggagctggacagccttgttcagtcctcacaatactgcaagggtgagaaccacccgcactttgaaggaggagtgaagcttggtgtaggggccttcaacctgacactgtccatgcttcctactaggatcctgaggctgttggagtttgtggggttttcaggaaacaaggactatgggctgctgcagctggaggagggagcgtcagggcacagcttccgctctgtgctctgtgtcatgctcctgctgtgctaccacaccttcctcaccttcgtgctcggtactgggaacgtcaacatcgaggaggccgagaagctcttgaagccctacctgaaccggtaccctaagggtgccatcttcctgttctttgcagggaggattgaagtcattaaaggcaacattgatgcagccatccggcgtttcgaggagtgctgtgaggcccagcagcactggaagcagtttcaccacatgtgctactgggagctgatgtggtgcttcacctacaagggccagtggaagatgtcctacttctacgccgacctgctcagcaaggagaactgctggtccaaggccacctacatttacatgaaggccgcctacctcagcatgtttgggaaggaggaccacaagccgttcggggacgacgaagtggaattatttcgagctgtgccaggcctgaagctcaagattgctgggaaatctctacccacagagaagtttgccatccggaagtcccggcgctacttctcctccaaccctatctcgctgccagtgcctgctctggaaatgatgtacatctggaacggctacgccgtgattgggaagcagccgaaactcacggatgggatacttgagattatcactaaggctgaagagatgctggagaaaggcccagagaacgagtactcagtggatgacgagtgcttggtgaaattgttgaaaggcctgtgtctgaaatacctgggccgtgtccaggaggccgaggagaattttaggagcatctctgccaatgaaaagaagattaaatatgaccactacttgatcccaaacgccctgctggagctggccctgctgcttatggagcaagacagaaacgaagaggccatcaaacttttggaatctgccaagcaaaactacaagaattactccatggagtcaaggacacactttcgaatccaggcagccacactccaagccaagtcttccctagagaacagcagcagatccatggtctcatcagtgtccttgtagctttgtgcagcagttccgggctggaagacagagacagctggacagagctcctgaaaacatttcaaaataccccctccccctgccctgccctgcctttggggtccaccggcactccagttggatggcacaacatagtgtatccgtgcagaagccgagctggcattttcaccagtgtagccaagggcctttgccaagggcagagcaggtggagccctctgcctgccctatcacacatacgggtacttgcttttcactgtgatgtttaagagaatgtatgaacagtttacattttccttagaaatacattgatgggatcacagttggctttaaaaaccaacaacaatcaaccacctgtaagtctttgtcttcacctattatcatctggaggtaaatctctttatatgatgatgccaaagggcaaattgcttttcaaattcagcaagttctcagcttgtgtgacggaaggtccttcagaggacctgaggaatgcctgggagaggctaagcctcaggcttcaatgcttctggggttgggcatgaggatgtacacagacacccactaccttactactcacacttcatttcactccttttgtaaatttccaatttaaaaatcaagcacgtctttttagtgagataaaatctgagctcttctgtagaaaaatcaatctctaccagtagaaaatgccagggcttgatggaagagctgtgtagccctttctatgccaaagccaggaaatttggggggcaggaggaggttctcagaatccagtctgtatctttgctgtatgccaaactgaaaccactgggaataatttatgaaacataaaaatcttctgtacttcactccaaggtacatttgcttactgacagcatttttgttaaaactgttattcttgaaaaaaaaaaaaaaaaaaa

SEQ ID NO: 191 - protein, 550 aa, Homo sapiens
MTALDLFLTNQFSEALSYLKPRTKESMYHSLTYATILEMQAMMTFDPQDILLAGNMMKEAQMLCQRHRRKSSVTDSFSSLVNRPTLGQFTEEEIHAEVCYAECLLQRAALTFLQDENMVSFIKGGIKVRNSYQTYKELDSLVQSSQYCKGENHPHFEGGVKLGVGAFNLTLSMLPTRILRLLEFVGFSGNKDYGLLQLEEGASGHSFRSVLCVMLLLCYHTFLTFVLGTGNVNIEEAEKLLKPYLNRYPKGAIFLFFAGRIEVIKGNIDAAIRRFEECCEAQQHWKQFHHMCYWELMWCFTYKGQWKMSYFYADLLSKENCWSKATYIYMKAAYLSMFGKEDHKPFGDDEVELFRAVPGLKLKIAGKSLPTEKFAIRKSRRYFSSNPISLPVPALEMMYIWNGYAVIGKQPKLTDGILEIITKAEEMLEKGPENEYSVDDECLVKLLKGLCLKYLGRVQEAEENFRSISANEKKIKYDHYLIPNALLELALLLMEQDRNEEAIKLLESAKQNYKNYSMESRTHFRIQAATLQAKSSLENSSRSMVSSVSL

SEQ ID NO: 192 - DNA, 4427 bp, Homo sapiens
atgactaggaagaggacatactgggtgcccaactcttctggtggcctcgtgaatcgtggcatcgacataggcgatgacatggtttcaggacttatttataaaacctatactctccaagatggcccctggagtcagcaagagagaaatcctgaggctccagggagggcagctgtcccaccgtgggggaagtatgatgctgccttgagaaccatgattcccttccgtcccaagccgaggtttcctgccccccagcccctggacaatgctggcctgttctcctacctcaccgtgtcatggctcaccccgctcatgatccaaagcttacggagtcgcttagatgagaacaccatccctccactgtcagtccatgatgcctcagacaaaaatgtccaaaggcttcaccgcctttgggaagaagaagtctcaaggcgagggattgaaaaagcttcagtgcttctggtgatgctgaggttccagagaacaaggttgattttcgatgcacttctgggcatctgcttctgcattgccagtgtactcgggccaatattgattataccaaagatcctggaatattcagaagagcagttggggaatgttgtccatggagtgggactctgctttgccctttttctctccgaatgtgtgaagtctctgagtttctcctccagttggatcatcaaccaacgcacagccatcaggttccgagcagctgtttcctcctttgcctttgagaagctcatccaatttaagtctgtaatacacatcacctcaggagaggccatcagcttcttcaccggtgatgtaaactacctgtttgaaggggtgtgctatggacccctagtactgatcacctgcgcatcgctggtcatctgcagcatttcttcctacttcattattggatacactgcatttattgccatcttatgctatctcctggttttcccactggcggtattcatgacaagaatggctgtgaaggctcagcatcacacatctgaggtcagcgaccagcgcatccgtgtgaccagtgaagttctcacttgcattaagctgattaaaatgtacacatgggagaaaccatttgcaaaaatcattgaaggtatggaaagtctgactttctgctccaaacctggtgatggcatggccttcagcatgctggcctccttgaatctccttcggctgtcagtgttctttgtgcctattgcagtcaaaggtctcacgaattccaagtctgcagtgatgaggttcaagaagtttttcctccaggagagccctgttttctatgtccagacattacaagaccccagcaaagctctggtctttgaggaggccaccttgtcatggcaacagacctgtcccgggatcgtcaatggggcactggagctggagaggaacgggcatgcttctgaggggatgaccaggcctagagatgccctcgggccagaggaagaagggaacagcctgggcccagagttgcacaagatcaacctggtggtgtccaaggggatgatgttaggggtctgcggcaacacggggagtggtaagagcagcctgttgtcagccatcctggaggagatgcacttgctcgagggctcggtgggggtgcagggaagcctggcctatgtcccccagcaggcctggatcgtcagcgggaacatcagggagaacatcctcatgggaggcgcatatgacaaggcccgatacctccaggtgctccactgctgctccctgaatcgggacctggaacttctgccctttggagacatgacagagattggagagcggggcctcaacctctctggggggcagaaacagaggatcagcctggcccgcgccgtctattccgaccgtcagatctacctgctggacgaccccctgtctgctgtggacgcccacgtggggaagcacatttttgaggagtgcattaagaagacactcagggggaagacggtcgtcctggtgacccaccagctgcagtacttagaattttgtggccagatcattttgttggaaaatgggaaaatctgtgaaaatggaactcacagtgagttaatgcagaaaaaggggaaatatgcccaacttatccagaagatgcacaaggaagccacttcggacatgttgcaggacacagcaaagatagcagagaagccaaaggtagaaagtcaggctctggccacctccctggaagagtctctcaacggaaatgctgtgccggagcatcagctcacacaggaggaggagatggaagaaggctccttgagttggagggtctaccaccactacatccaggcagctggaggttacatggtctcttgcataattttcttcttcgtggtgctgatcgtcttcttaacgatcttcagcttctggtggctgagctactggttggagcagggctcggggaccaatagcagccgagagagcaatggaaccatggcagacctgggcaacattgcagacaatcctcaactgtccttctaccagctggtgtacgggctcaacgccctgctcctcatctgtgtgggggtctgctcctcagggattttcaccaaagtcacgaggaaggcatccacggccctgcacaacaagctcttcaacaaggttttccgctgccccatgagtttctttgacaccatcccaataggccggcttttgaactgcttcgcaggggacttggaacagctggaccagctcttgcccatcttttcagagcagttcctggtcctgtccttaatggtgatcgccgtcctgttgattgtcagtgtgctgtctccatatatcctgttaatgggagccataatcatggttatttgcttcatttattatatgatgttcaagaaggccatcggtgtgttcaagagactggagaactatagccggtctcctttattctcccacatcctcaattctctgcaaggcctgagctccatccatgtctatggaaaaactgaagacttcatcagccagtttaagaggctgactgatgcgcagaataactacctgctgttgtttctatcttccacacgatggatggcattgaggctggagatcatgaccaaccttgtgaccttggctgttgccctgttcgtggcttttggcatttcctccaccccctactcctttaaagtcatggctgtcaacatcgtgctgcagctggcgtccagcttccaggccactgcccggattggcttggagacagaggcacagttcacggctgtagagaggatactgcagtacatgaagatgtgtgtctcggaagctcctttacacatggaaggcacaagttgtccccaggggtggccacagcatggggaaatcatatttcaggattatcacatgaaatacagagacaacacacccaccgtgcttcacggcatcaacctgaccatccgcggccacgaagtggtgggcatcgtgggaaggacgggctctgggaagtcctccttgggcatggctctcttccgcctggtggagcccatggcaggccggattctcattgacggcgtggacatttgcagcatcggcctggaggacttgcggtccaagctctcagtgatccctcaagatccagtgctgctctcaggaaccatcagattcaacctagatccctttgaccgtcacactgaccagcagatctgggatgccttggagaggacattcctgaccaaggccatctcaaagttccccaaaaagctgcatacagatgtggtggaaaacggtggaaacttctctgtgggggagaggcagctgctctgcattgccagggctgtgcttcgcaactccaagatcatccttatcgatgaagccacagcctccattgacatggagacagacaccctgatccagcgcacaatccgtgaagccttccagggctgcaccgtgctcgtcattgcccaccgtgtcaccactgtgctgaactgtgaccacatcctggttatgggcaatgggaaggtggtagaatttgatcggccggaggtactgcggaagaagcctgggtcattgttcgcagccctcatggccacagccacttcttcactgagataaggagatgtggagacttcatggaggctggcagctgagctcagaggttcacacaggtgcagcttcgaggcccacagtctgcgaccttcttgtttggagatgagaacttctcctggaagcaggggtaaatgtagggggggtggggattgctggatggaaaccctggaataggctacttgatggctctcaagaccttagaaccccagaaccatctaagacatgggattcagtgatcatgtggttctccttttaacttacatgctgaataattttataataaggtaaaagcttatagttttctgatctgtgttagaagtgytgcaaatgctgtactgactttgtaaaatataaaactaaggaaaactcaaaaaaaaaaaaaaaaaaaa

SEQ ID NO: 193 - protein, 1347 aa, Homo sapiens
MTRKRTYWVPNSSGGLVNRGIDIGDDMVSGLIYKTYTLQDGPWSQQERNPEAPGRAAVPPWGKYDAALRTMIPFRPKPRFPAPQPLDNAGLFSYLTVSWLTPLMIQSLRSRLDENTIPPLSVHDASDKNVQRLHRLWEEEVSRRGIEKASVLLVMLRFQRTRLIFDALLGICFCIASVLGPILIIPKILEYSEEQLGNVVHGVGLCFALFLSECVKSLSFSSSWIINQRTAIRFRAAVSSFAFEKLIQFKSVIHITSGEAISFFTGDVNYLFEGVCYGPLVLITCASLVICSISSYFIIGYTAFIAILCYLLVFPLAVFMTRMAVKAQHHTSEVSDQRIRVTSEVLTCIKLIKMYTWEKPFAKIIEGMESLTFCSKPGDGMAFSMLASLNLLRLSVFFVPIAVKGLTNSKSAVMRFKKFFLQESPVFYVQTLQDPSKALVFEEATLSWQQTCPGIVNGALELERNGHASEGMTRPRDALGPEEEGNSLGPELHKINLVVSKGMMLGVCGNTGSGKSSLLSAILEEMHLLEGSVGVQGSLAYVPQQAWIVSGNIRENILMGGAYDKARYLQVLHCCSLNRDLELLPFGDMTEIGERGLNLSGGQKQRISLARAVYSDRQIYLLDDPLSAVDAHVGKHIFEECIKKTLRGKTVVLVTHQLQYLEFCGQIILLENGKICENGTHSELMQKKGKYAQLIQKMHKEATSDMLQDTAKIAEKPKVESQALATSLEESLNGNAVPEHQLTQEEEMEEGSLSWRVYHHYIQAAGGYMVSCIIFFFVVLIVFLTIFSFWWLSYWLEQGSGTNSSRESNGTMADLGNIADNPQLSFYQLVYGLNALLLICVGVCSSGIFTKVTRKASTALHNKLFNKVFRCPMSFFDTIPIGRLLNCFAGDLEQLDQLLPIFSEQFLVLSLMVIAVLLIVSVLSPYILLMGAIIMVICFIYYMMFKKAIGVFKRLENYSRSPLFSHILNSLQGLSSIHVYGKTEDFISQFKRLTDAQNNYLLLFLSSTRWMALRLEIMTNLVTLAVALFVAFGISSTPYSFKVMAVNIVLQLASSFQATARIGLETEAQFTAVERILQYMKMCVSEAPLHMEGTSCPQGWPQHGEIIFQDYHMKYRDNTPTVLHGINLTIRGHEVVGIVGRTGSGKSSLGMALFRLVEPMAGRILIDGVDICSIGLEDLRSKLSVIPQDPVLLSGTIRFNLDPFDRHTDQQIWDALERTFLTKAISKFPKKLHTDVVENGGNFSVGERQLLCIARAVLRNSKIILIDEATASIDMETDTLIQRTIREAFQGCTVLVIAHRVTTVLNCDHILVMGNGKVVEFDRPEVLRKKPGSLFAALMATATSSLR

SEQ ID NO: 194 - DNA, 3690 bp, Homo sapiens
atgctgtctggcttcttgatgagtcccagtacccagcacagagcacagtacactcccggaggaaagaaacttccgtgggaggcttccatcggtgcgcacacctcccgagggcgaggcagcgaccgggagagggagagccggccggaggctgccgggctcctgtgggaccgcgctgcagccggggaggcggagaaggggaaccggggcgagccgcccgcctggatccgcgcccagcagcagccgcggccgccgccagctgggcaggctcccgggactgcggctgggggcgcgcaggaccctcgcctgcgtcctggacgttcccgggggagggtccggttgccagtgaaacctccagaggcttccggacgacagccccgggggccttctgactgcatcccgagatttccatcagcgagtgcaactcataaggcagtccctaaggggaccgggccaccggctgaggacggggatggcttaggagctcctggacctagggcccggcgtcgtcgcctcctgggcgtcgcggcagaggggagtggcccgcgcggaaagcgccgcgggacagtcagtgacgaggcccgggggtcgccggggccacgacttctcggagaccgtcctgcgctctctggagacgcgctgtccgcgcccagggtggtgccatgtggggcgctcgccgctcgtccgtctcctcatcctggaacgccgcttcgctcctgcagctgctgctggctgcgctgctggcggcgggggcgagggcccagcggcgagtactgccacggctggctggacgcgcagggcgtctggcgcatcggcttccagtgtcccgagcgcttcgacggcggcgacgccaccatctgctgcggcagctgcgcgttgcgctactgctgctccagcgccgaggcgcgcctggaccagggcggctgcgacaatgaccgccagcagggcgctggcgagcctggccgggcggacaaagacgggccccgacggctcggcagggcttcatgtcttaggggtacccaaggagacggcgagggtgcgcccccacccgtgagggcctggcagcggtgctcccctgaaggctccccgaaaggaaggcagctcctcagggctttcccggggctgctgccccgtgccagacgccgcggattcccatcttctccacgcggcggcccctctcccctgcagcggcccgccttgcccatctacgtgccgttcctcattgttggctccgtgtttgtcgcctttatcatcttggggtccctggtggcagcctgttgctgcagatgtctccggcctaagcaggatccccagcagagccgagccccagggggtaaccgcttgatggagaccatccccatgatccccagtgccagcacctcccgggggtcgtcctcacgccagtccagcacagctgccagttccagctccagcgccaactccggggcccgggcgcccccaacaaggtcacagaccaactgttgcttgccggaagggaccatgaacaacgtgtatgtcaacatgcccacgaatttctctgtgctgaactgtcagcaggccacccagattgtgccacatcaagggcagtatctgcatcccccatacgtggggtacacggtgcagcacgactctgtgcccatgacagctgtgccacctttcatggacggcctgcagcctggctacaggcagattcagtcccccttccctcacaccaacagtgaacagaagatgtacccagcggtgactgtataaccgagagtcactggtgggttcctttactgaagggagacgaaggcaggggtggattctcgaggtggaagtccgcacatgtcggtggtatttatggcacgattcctttggatggcttcatttgcccccagactgtatgaaaacatctccgaattagcatttctggatatgtttcatccagggtatcattgatttatgatggaaaaccggcctcagctggagatgactgtgatgttgctgatgggtgtataacaaatgcttgagtccgaagtgcccttgagatatggttgacgaaagaattttataaactgataaattaaggatttttattatgttgttattattatttcttttttgttgttgactgcacaggatcaaaatgcctgttatctcccttttactgggactttttttttttttttttttttttttaatcagacagggtcttgctctgttgcccaggctggagtgcagtggtgcgatctcggctcactgcaacttcagcctcctggattcaggcaacactcctgcctcagcctcccacgtggctgggattacaggtgcctgcccccatggctaattttttgtattttttgtagagatggggtttcaccatgttggctgggctggtctcactctcctgacctcaagcaatctgcctgtctcagcctcccaaagtgctgggattacaggcgtgagccaccgcccccagcctgagcctttttttttttctaatgcatccaaggttaaggggaagacgcaaataacaggactattctaaaaggaaacctgtttgaactctgtgagatcagtcatcagtctcagtattccacaggcacaccttaatttcattgtaaaaagatatatatattttgtctatttttgtgcttttgggggcctattttgtgcttttttaccttatgtagagatcttattacaaagtgattttctacattaaaaagagactgaaataaattgtatagttacttaactaatgaagacatttcagaactctgggatgattttaatcttgaagtagtaggtggtatagtcataaaaccattcatccccttcttgattgtatcttaattttctggctttaaggtgacatctgagaggtaatgcattcttttttatattgaaatcataaactatcacccgctgcttctctgagttacttttaattttgccttgtggttatggtttggcgtttccttctgtttggttttcagagccccatgtctatatagtcctgagtgcaagtaattactatacttgtaaatgaagatcagtatttctgcctagatctgataaaaaaattttcttgtcttagttataaaaattcaaagaaatgtgttacaaagatacttagtatagctcctcagccataacctgagacttgggatgaaatttaaaccagatacgatttactttgcagatcataaggctttttatactcttgttatcaaaatggcttatttttcaggcactaaggattgttaagagaaaagcttttcaacgaaggattgcctttcttctcccacactgttcttgatttcctctctctttcaggcctcaacaggcactgtattcattgccaatgttccaaattatcaaattcaagtgaatttatttgtgtgttctttacttatataaaaaaagataactttaaggatgtgcaagtacatttccaactgctagcacaaccagtattttgtaattaaacaaatcgctgtatggtatggtcttctacacatttatgtctatagatatctatcgatcatctttctattctgtttcatgactgaataatgtaaaaccagtgttggcaattggtatcatcaatgatactcattttttaataaccaaaggcaggggaaaatcattttacttattaataaatattttatgatgtgaaaaaaaaaaaaaaaaaaaaaaaaaaaa

SEQ ID NO: 195 - protein, 582 aa, Homo sapiens [sequence omitted]

SEQ ID NO: 196 - DNA, 3096 bp, Homo sapiens
gcccttggacactgacatggactgaaggagtagaatggagcacgaggacactgacatggactgaagaaaaaggagctggagcaggagaaggaggtgctgctgcagggtttggagatgatggcgcggggccgcgactggtaccagcagcagctgcaacgagtgcaggagcgccagcgccgcctgggccagagcagagccagcgccgactttggggctgcagggagcccccgcccactggggcggctactgcccaaggtacaagaggtggcccggtgcctgggggagctgctggctgcagcctgtgccagccgggccctgcccccgtcctcctccgggcccccctgccctgccctgacgtccacctcacccccggtctggcagcagcagaccatcctcatgctgaaggagcagaaccgactcctcacccaggaggtgaccgagaagagtgagcgcatcacgcagctggagcaggagaagtcggcgctcattaagcagctgtttgaggcccgcgccctgagccagcaggacgggggacctctggattccaccttcatctagtccttgtgggccgcgtgggcccccagggccagcctggcactcagcccttcgagggtgggcgccccatcgcacccaccctctctggctggagacccccggcaggcccaggcacagtcccggagtgggcgccttcctgccgcccttgccagatgggctccccaggcctgcccccggctggtccccgcaccgagcgcttgactccgtttkggctcctggttgytgacatgggctgggggctctcttgagtccgcatagtccgcagctactactggccgctgtcagtggacagtggggtacccctccatgagttagcgtccccccgtttccagcggtgccgccctgggtcccatcttcagggaaaggcactgcccacgccaggctgcacttccaacaacgggcagcagagggcgcggggcggctccgacgcgggtccaagggcagcttcccgctcaaccagggcaccaggacgaggtggctgtagctcggacggacggaagtagatggagggggtggggacggcctgtaagcggggggtgcctgcctggctggggagccccagggatagcggtcggacttcaggttctggccaaggctgagggaccctggctgcagcggatcggcacgccgggtgggcgagagcttggcctgcatgtgcctcccacagaccctggggtgatggccttccccctcttggccgggacgttgccccacgttgagtcccacacaacatcctgtgagcctggctccccaggagggcccccagacagctcccaggcacgtcataggcaaagcctgtttcccccgactcaggatttccaaggcctggggtcctgctcacccccctttgctctcacgcccagcctgtccccaggtttcagctgggagaggccacctccctcagccaaggaaaacgagaacccccagggtacaggaggaggctggggcaggtccccttgggtgtcactccctcagcccctgcccaggcccactcccgctggtgctggagtacgcactggtgggggggccctgctcagcccaacctggagggtcccagtgtcaccagaaccaggggcacggcaacagcatcgatgggttctgcagcccagggcccccgatgcggggtcagtgtgtgtggggcgcagggcctccgatgcggggtcagtgcgtggggggcgcagggcccccgatgcggggtcagtgcgtggggggcgcagggccccctcgtgtccagggcactttggtacactgtcccacaaggcacctgtctcagaggaggggccctggcaggcagcgtggcaactcccttccggagcccagctccatgctaacctgcccacagcaaccccacagagccacattccctgctgcacctggtctgcaggggtgtcccaggacaggcccaagtcagcccagcatgcagctgccctcctaccctgaagatgggagtgggctttccaggggacataaggatgtcaggcctggacctcctgggcaggaaagggtgcaggtcctgagggcctgtgccccacagccccagcacccaggtggactgcagcgcagtgggtgggccagtggcagccagggagaagccccccgtcagcaggctggggtctgcccaccagggcctccccacgtctgcctttgagggtgcctgccatgccctgggggatcctggcatctttactggactggaagcaggagacagaacagtgtctgtcccggggtgacttcatcaggagaccgcccacatagagctggaccccgcagctgaagcggaaatgtgagacaggctggcacctccggaaaaactgcctttcagccttggtgttccgtgcaaggtgaaaagaaataggtcctcccagtttacagcttgaaatcaggctagtgagtggccctggagaccacgaggggagaatttaaaggccccggctggcagggtctaggtggctggcagaggcacatgcagaccctgcctggagcctgccctaggacgctgggcgggtcagtctccgtgcaggatgtgagcagcgtccctgggctctatccgcgaggtgccagtagcgtgtgcaggtacatacacgtgcgtgcacactgtgatgacacccggaaatgtctcaggatgttgaaatgtgtccttgggggcagaagtgtccccagttgagaatctgccccagaggaacacacccacaccaggcctcaggattttgtgttgatcaagttccaaggaaaaggaacatctcagccgggcgtggtggttcacgcctggaatcccagcacttgaggccaggagttccagagcagcctgggcaacgcagtgagagaccccatctctacaaraaaaaaaaaagaaagaaagaaaatgagagatccaggtttaaaaattcataaacaccacaaggaaacaatacactatgagacccagcagaagcaacagattgactctagacccagatactagaattatcagagagaatataaagtaacagtgttttatatatctaaagaaataaaagagatttctggaaacatgaaaaaaaa

SEQ ID NO: 197 - DNA, 3171 bp, Homo sapiens
gcggaacaccggcccgccgtcgcggcagctgcttcacccctctctctgcagccatggggctccctcgtggacctctcgcgtctctcctccttctccaggtttgctggctgcagtgcgcggcctccgagccgtgccgggcggtcttcagggaggctgaagtgaccttggaggcgggaggcgcggagcaggagcccggccaggcgctggggaaagtattcatgggctgccctgggcaagagccagctctgtttagcactgataatgatgacttcactgtgcggaatggcgagacagtccaggaaagaaggtcactgaaggaaaggaatccattgaagatcttcccatccaaacgtatcttacgaagacacaagagagattgggtggttgctccaatatctgtccctgaaaatggcaagggtcccttcccccagagactgaatcagctcaagtctaataaagatagagacaccaagattttctacagcatcacggggccgggggcagacagcccccctgagggtgtcttcgctgtagagaaggagacaggctggttgttgttgaataagccactggaccgggaggagattgccaagtatgagctctttggccacgctgtgtcagagaatggtgcctcagtggaggaccccatgaacatctccatcatcgtgaccgaccagaatgaccacaagcccaagtttacccaggacaccttccgagggagtgtcttagagggagtcctaccaggtacttctgtgatgcaggtgacagccacagatgaggatgatgccatctacacctacaatggggtggttgcttactccatccatagccaagaaccaaaggacccacacgacctcatgttcacaattcaccggagcacaggcaccatcagcgtcatctccagtggcctggaccgggaaaaagtccctgagtacacactgaccatccaggccacagacatggatggggacggctccaccaccacggcagtggcagtagtggagatccttgatgccaatgacaatgctcccatgtttgacccccagaagtacgaggcccatgtgcctgagaatgcagtgggccatgaggtgcagaggctgacggtcactgatctggacgcccccaactcaccagcgtggcgtgccacctaccttatcatgggcggtgacgacggggaccattttaccatcaccacccaccctgagagcaaccagggcatcctgacaaccaggaagggtttggattttgaggccaaaaaccagcacaccctgtacgttgaagtgaccaacgaggccccttttgtgctgaagctcccaacctccacagccaccatagtggtccacgtggaggatgtgaatgaggcacctgtgtttgtcccaccctccaaagtcgttgaggtccaggagggcatccccactggggagcctgtgtgtgtctacactgcagaagaccctgacaaggagaatcaaaagatcagctaccgcatcctgagagacccagcagggtggctagccatggacccagacagtgggcaggtcacagctgtgggcaccctcgaccgtgaggatgagcagtttgtgaggaacaacatctatgaagtcatggtcttggccatggacaatggaagccctcccaccactggcacgggaacccttctgctaacactgattgatgtcaacgaccatggcccagtccctgagccccgtcagatcaccatctgcaaccaaagccctgtgcgccacgtgctgaacatcacggacaaggacctgtctccccacacctcccctttccaggcccagctcacagatgactcagacatctactggacggcagaggtcaacgaggaaggtgacacagtggtcttgtccctgaagaagttcctgaagcaggatacatatgacgtgcacctttctctgtctgaccatggcaacaaagagcagctgacggtgatcagggccactgtgtgcgactgccatggccatgtcgaaacctgccctggaccctggaaaggaggtttcatcctccctgtgctgggggctgtcctggctctgctgttcctcctgctggtgctgcttttgttggtgagaaagaagcggaagatcaaggagcccctcctactcccagaagatgacacccgtgacaacgtcttctactatggcgaagaggggggtggcgaagaggaccaggactatgacatcacccagctccaccgaggtctggaggccaggccggaggtggttctccgcaatgacgtggcaccaaccatcatcccgacacccatgtaccgtcctaggccagccaacccagatgaaatcggcaactttataattgagaacctgaaggcggctaacacagaccccacagccccgccctacgacaccctcttggtgttcgactatgagggcagcggctccgacgccgcgtccctgagctccctcacctcctccgcctccgaccaagaccaagattacgattatctgaacgagtggggcagccgcttcaagaagctggcagacatgtacggtggcggggaggacgactaggcggcctgcctgcagggctggggaccaaacgtcaggccacagagcatctccaaggggtctcagttcccccttcagctgaggacttcggagcttgtcaggaagtggccgtagcaacttggcggagacaggctatgagtctgacgttagagtggttgcttccttagcctttcaggatggaggaatgtgggcagtttgacttcagcactgaaaacctctccacctgggccagggttgcctcagaggccaagtttccagaagcctcttacctgccgtaaaatgctcaaccctgtgtcctgggcctgggcctgctgtgactgacctacagtggactttctctctggaatggaaccttcttaggcctcctggtgcaacttaatttttttttttaatgctatcttcaaaacgttagagaaagttcttcaaaagtgcagcccagagctgctgggcccactggccgtcctgcatttctggtttccagaccccaatgcctcccattcggatggatctctgcgtttttatactgagtgtgcctaggttgccccttattttttattttccctgttgcgttgctatagatgaagggtgaggacaatcgtgtatatgtactagaacttttttattaaagaaa

SEQ ID NO: 198 - protein, 829 aa, Homo sapiens [sequence omitted]

SEQ ID NO: 199 - DNA, 1148 bp, Homo sapiens
cttctttaaatttctttctaggatgttcacttcttctccacaatgaatgagtgtcactatgacaagcacatggactttttttataataggagcaacactgatactgtcgatgactggacaggaacaaagcttgtgattgttttgtgtgttgggacgtttttctgcctgtttatttttttttctaattctctggtcatcgcggcagtgatcaaaaacagaaaatttcatttccccttctactacctgttggctaatttagctgctgccgatttcttcgctggaattgcctatgtattcctgatgtttaacacaggcccagtttcaaaaactttgactgtcaaccgctggtttctccgtcaggggcttctggacagtagcttgactgcttccctcaccaacttgctggttatcgccgtggagaggcacatgtcaatcatgaggatgcgggtccatagcaacctgaccaaaaagagggtgacactgctcattttgcttgtctgggccatcgccatttttatgggggcggtccccacactgggctggaattgcctctgcaacatctctgcctgctcttccctggcccccatttacagcaggagttaccttgttttctggacagtgtccaacctcatggccttcctcatcatggttgtggtgtacctgcggatctacgtgtacgtcaagaggaaaaccaacgtcttgtctccgcatacaagtgggtccatcagccgccggaggacacccatgaagctaatgaagacggtgatgactgtcttaggggcgtttgtggtatgctggaccccgggcctggtggttctgctcctcgacggcctgaactgcaggcagtgtggcgtgcagcatgtgaaaaggtggttcctgctgctggcgctgctcaactccgtcgtgaaccccatcatctactcctacaaggacgaggacatgtatggcaccatgaagaagatgatctgctgcttctctcaggagaacccagagaggcgtccctctcgcatcccctccacagtcctcagcaggagtgacacaggcagccagtacatagaggatagtattagccaaggtgcagtctgcaataaaagcacttcctaaactctggatgcctctcggcccacccaggtgatgactgtcttagg

SEQ ID NO: 200 - protein, 353 aa, Homo sapiens
MNECHYDKHMDFFYNRSNTDTVDDWTGTKLVIVLCVGTFFCLFIFFSNSLVIAAVIKNRKFHFPFYYLLANLAAADFFAGIAYVFLMFNTGPVSKTLTVNRWFLRQGLLDSSLTASLTNLLVIAVERHMSIMRMRVHSNLTKKRVTLLILLVWAIAIFMGAVPTLGWNCLCNISACSSLAPIYSRSYLVFWTVSNLMAFLIMVVVYLRIYVYVKRKTNVLSPHTSGSISRRRTPMKLMKTVMTVLGAFVVCWTPGLVVLLLDGLNCRQCGVQHVKRWFLLLALLNSVVNPIIYSYKDEDMYGTMKKMICCFSQENPERRPSRIPSTVLSRSDTGSQYIEDSISQGAVCNKSTS

SEQ ID NO: 201 - DNA, 892 bp, Homo sapiens
atgacctacagttactcatttttcaggcctgagttgatcgttaatcatcttaattatgttcattctgaagccaacaggagaaccaagaccaaaactttattgtctctgctttcatttcttgatgaaacctctggactaagcacacatcttccttgtttatctctctcaaaggagtgtggagtgcttcatctggacatccacgggaagaaggaagacatgagaatcacccaacagtcttcccagctatacctgtgggacatgggtggttttacaatatttaagaacctgtggatgagcctcatacccagagggaacaaacgctccccaaaaagagttacagaaaccatcctgagagattttaagcagaagcaaagttcaaagatccaagaggagagacgaagagagtctgcaggaccaaacctctcttcattctggtttgtggggaatgctggaagaggagacaggccccagatttgggcaggaagtaaacagttttcaggctgaggccaatctgagcaggaacattccaatatttcttcagctacgttgtcccagcacttcactggttaaccttttatgtccaccatttgtggatttcacagctacttgtcaatggtgaatattgatcatcatcattatctactgagctgctaccatatcccagctactccttgcatgttgttcattattttctcaacactcagcatatttgcaatatgttatgtaatatcacagacaaggaaactgaacgcagaaatgttttatttcttgccaaacatcacatgaggatgaacaatgaaaccgatttgaaaccaggattgtctgattccaacatctctgggtcctttttcactctgatatgctgcaattaaaaagccatttctaagactgt

SEQ ID NO: 202 - protein, 167 aa, Homo sapiens [sequence omitted]

SEQ ID NO: 203 - DNA, 2582 bp, Homo sapiens
  modified_base (2553)..(2553): a, c, g, t, unknown or other
  modified_base (2556)..(2556): a, c, g, t, unknown or other
tcacacgtgccaaggggctggctcagcggaaccagcctgcacgcgctggctccgggtgacagccgcgcgcctcggccaggatctgagtgatgagacgtgtccccactgaggtgccccacagcagcaggtgttgagcatgggctgagaagctggaccggcaccaaagggctggcagaaatgggcgcctggctgattcctaggcagttggcggcagcaaggaggagaggccgcagcttctggagcagagccgagacgaagcagttctggagtgcctgaacggccccctgagccctacccgcctggcccactatggtccagaggctgtgggtgagccgcctgctgcggcaccggaaagcccagctcttgctggtcaacctgctaacctttggcctggaggtgtgtttggccgcaggcatcacctatgtgccgcctctgctgctggaagtgggggtagaggagaagttcatgaccatggtgctgggcattggtccagtgctgggcctggtctgtgtcccgctcctaggctcagccagtgaccactggcgtggacgctatggccgccgccggcccttcatctgggcactgtccttgggcatcctgctgagcctctttctcatcccaagggccggctggctagcagggctgctgtgcccggatcccaggcccctggagctggcactgctcatcctgggcgtggggctgctggacttctgtggccaggtgtgcttcactccactggaggccctgctctctgacctcttccgggacccggaccactgtcgccaggcctactctgtctatgccttcatgatcagtcttgggggctgcctgggctacctcctgcctgccattgactgggacaccagtgccctggccccctacctgggcacccaggaggagtgcctctttggcctgctcaccctcatcttcctcacctgcgtagcagccacactgctggtggctgaggaggcagcgctgggccccaccgagccagcagaagggctgtcggccccctccttgtcgccccactgctgtccatgccgggcccgcttggctttccggaacctgggcgccctgcttccccggctgcaccagctgtgctgccgcatgccccgcaccctgcgccggctcttcgtggctgagctgtgcagctggatggcactcatgaccttcacgctgttttacacggatttcgtgggcgaggggctgtaccagggcgtgcccagagctgagccgggcaccgaggcccggagacactatgatgaaggcgttcggatgggcagcctggggctgttcctgcagtgcgccatctccctggtcttctctctggtcatggaccggctggtgcagcgattcggcactcgagcagtctatttggccagtgtggcagctttccctgtggctgccggtgccacatgcctgtcccacagtgtggccgtggtgacagcttcagccgccctcaccgggttcaccttctcagccctgcagatcctgccctacacactggcctccctctaccaccgggagaagcaggtgttcctgcccaaataccgaggggacactggaggtgctagcagtgaggacagcctgatgaccagcttcctgccaggccctaagcctggagctcccttccctaatggacacgtgggtgctggaggcagtggcctgctcccacctccacccgcgctctgcggggcctctgcctgtgatgtctccgtacgtgtggtggtgggtgagcccaccgaggccagggtggttccgggccggggcatctgcctggacctcgccatcctggatagtgccttcctgctgtcccaggtggccccatccctgtttatgggctccattgtccagctcagccagtctgtcactgcctatatggtgtctgccgcaggcctgggtctggtcgccatttactttgctacacaggtagtatttgacaagagcgacttggccaaatactcagcgtagaaaacttccagcacattggggtggagggcctgcctcactgggtcccagctccccgctcctgttagccccatggggctgccgggctggccgccagtttctgttgctgccaaagtaatgtggctctctgctgccaccctgtgctgctgaggtgcgtagctgcacagctgggggctggggcgtccctctcctctctccccagtctctagggctgcctgactggaggccttccaagggggtttcagtctggacttatacagggaggccagaagggctccatgcactggaatgcggggactctgcaggtggattacccaggctcagggttaacagctagcctcctagttgagacacacctagagaagggtttttgggagctgaataaactcagtcacctggtttcccatctctaagccccttaacctgcagcttcgtttaatgtagctcttgcatgggagtttctaggatgaaacactcctccatgggatttgaacatatgaaagttatttgtaggggaagagtcctgaggggcaacacacaagaaccaggtcccctcagccccacaggcactggtcttttttgctngantccaccccccccctctttaccctttt

SEQ ID NO: 204 - protein, 553 aa, Homo sapiens
MVQRLWVSRLLRHRKAQLLLVNLLTFGLEVCLAAGITYVPPLLLEVGVEEKFMTMVLGIGPVLGLVCVPLLGSASDHWRGRYGRRRPFIWALSLGILLSLFLIPRAGWLAGLLCPDPRPLELALLILGVGLLDFCGQVCFTPLEALLSDLFRDPDHCRQAYSVYAFMISLGGCLGYLLPAIDWDTSALAPYLGTQEECLFGLLTLIFLTCVAATLLVAEEAALGPTEPAEGLSAPSLSPHCCPCRARLAFRNLGALLPRLHQLCCRMPRTLRRLFVAELCSWMALMTFTLFYTDFVGEGLYQGVPRAEPGTEARRHYDEGVRMGSLGLFLQCAISLVFSLVMDRLVQRFGTRAVYLASVAAFPVAAGATCLSHSVAVVTASAALTGFTFSALQILPYTLASLYHREKQVFLPKYRGDTGGASSEDSLMTSFLPGPKPGAPFPNGHVGAGGSGLLPPPPALCGASACDVSVRVVVGEPTEARVVPGRGICLDLAILDSAFLLSQVAPSLFMGSIVQLSQSVTAYMVSAAGLGLVAIYFATQVVFDKSDLAKYSA

SEQ ID NO: 205 - DNA, 1593 bp, Homo sapiens
atggttcgccgggggctgcttgcgtggatttcccgggtggtggttttgctggtgctcctctgctgtgctatctctgtcctgtacatgttggcctgcaccccaaaaggtgacgaggagcagctggcactgcccagggccaacagccccacggggaaggaggggtaccaggccgtccttcaggagtgggaggagcagcaccgcaactacgtgagcagcctgaagcggcagatcgcacagctcaaggaggagctgcaggagaggagtgagcagctcaggaatgggcagtaccaagccagcgatgctgctggcctgggtctggacaggagccccccagagaaaacccaggccgacctcctggccttcctgcactcgcaggtggacaaggcagaggtgaatgctggcgtcaagctggccacagagtatgcagcagtgcctttcgatagctttactctacagaaggtgtaccagctggagactggccttacccgccaccccgaggagaagcctgtgaggaaggacaagcgggatgagttggtggaagccattgaatcagccttggagaccctgaacaatcctgcagagaacagccccaatcaccgtccttacacggcctctgatttcatagaagggatctaccgaacagaaagggacaaagggacattgtatgagctcaccttcaaaggggaccacaaacacgaattcaaacggctcatcttatttcgaccattcggccccatcatgaaagtgaaaaatgaaaagctcaacatggccaacacgcttatcaatgttatcgtgcctctagcaaaaagggtggacaagttccggcagttcatgcagaatttcagggagatgtgcattgagcaggatgggagagtccatctcactgttgtttactttgggaaagaagaaataaatgaagtcaaaggaatacttgaaaacacttccaaagctgccaacttcaggaactttaccttcatccagctgaatggagaattttctcggggaaagggacttgatgttggagcccgcttctggaagggaagcaacgtccttctctttttctgtgatgtggacatctacttcacatctgaattcctcaatacgtgtaggctgaatacacagccagggaagaaggtattttatccagttcttttcagtcagtacaatcctggcataatatacggccaccatgatgcagtccctcccttggaacagcagctggtcataaagaaggaaactggattttggagagactttggatttgggatgacgtgtcagtatcggtcagacttcatcaatataggtgggtttgatctggacatcaaaggctggggcggagaggatgtgcacctttatcgcaagtatctccacagcaacctcatagtggtacggacgcctgtgcgaggactcttccacctctggcatgagaagcgctgcatggacgagctgacccccgagcagtacaagatgtgcatgcagtccaaggccatgaacgaggcatcccacggccagctgggcatgctggtgttcaggcacgagatagaggctcaccttcgcaaacagaaacagaagacaagtagcaaaaaaacatga

SEQ ID NO: 206 - protein, 530 aa, Homo sapiens [sequence omitted]

SEQ ID NO: 207 - DNA, 2712 bp, Homo sapiens
atgattcctgtattgacatcaaaaaaagcaagtgaattaccagtcagtgaagttgcaagcattctccaagctgatcttcagaatggtctaaacaaatgtgaagttagtcataggcgagcctttcatggctggaatgagtttgatattagtgaagatgagccactgtggaagaagtatatttctcagtttaaaaatccccttattatgctgcttctggcttctgcagtcatcagtgttttaatgcatcagtttgatgatgccgtcagtatcactgtggcaatacttatcgttgttacagttgcctttgttcaggaatatcgttcagaaaaatctcttgaagaattgagtaaacttgtgccaccagaatgccattgtgtgcgtgaaggaaaattggagcatacacttgcccgagacttggttccaggtgatacagtttgcctttctgttggggatagagttcctgctgacttacgcttgtttgaggctgtggatctttccattgatgagtccagcttgacaggtgagacaacgccttgttctaaggtgacagctcctcagccagctgcaactaatggagatcttgcatcgagaagtaacattgcctttatgggaacactggtcagatgtggcaaagcaaagggtgttgtcattggaacaggagaaaattctgaatttggggaggtttttaaaatgatgcaagcagaagaggcaccaaaaacccctctgcagaagagcatggacctcttaggaaaacaactttccttttactcctttggtataataggaatcatcatgttggttggctggttactgggaaaagatatcctggaaatgtttactattagtgtaagtttggctgtagcagcaattcctgaaggtctccccattgtggtcacagtgacgctagctcttggtgttatgagaatggtgaagaaaagggccattgtgaaaaagctgcctattgttgaaactctgggctgctgtaatgtgatttgttcagataaaactggaacactgacgaagaatgaaatgactgttactcacatatttacttcagatggtctgcatgctgaggttactggagttggctataatcaatttggggaagtgattgttgatggtgatgttgttcatggattctataacccagctgttagcagaattgttgaggcgggctgtgtgtgcaatgatgctgtaattagaaacaatactctaatggggaagccaacagaaggggccttaattgctcttgcaatgaagatgggtcttgatggacttcaacaagactacatcagaaaagctgaatacccttttagctctgagcaaaagtggatggctgttaagtgtgtacaccgaacacagcaggacagaccagagatttgttttatgaaaggtgcttacgaacaagtaattaagtactgtactacataccagagcaaagggcagaccttgacacttactcagcagcagagagatgtgtaccaacaagagaaggcacgcatgggctcagcgggactcagagttcttgctttggcttctggtcctgaactgggacagctgacatttcttggcttggtgggaatcattgatccacctagaactggtgtgaaagaagctgttacaacactcattgcctcaggagtatcaataaaaatgattactggagattcacaggagactgcagttgcaatcgccagtcgtctgggattgtattccaaaacttcccagtcagtctcaggagaagaaatagatgcaatggatgttcagcagctttcacaaatagtaccaaaggttgcagtattttacagagctagcccaaggcacaagatgaaaattattaagtcgctacagaagaacggttcagttgtagccatgacaggagatggagtaaatgatgcagttgctctgaaggctgcagacattggagttgcgatgggccagactggtacagatgtttgcaaagaggcagcagacatgatcctagtggatgatgattttcaaaccataatgtctgcaatcgaagagggtaaagggatttataataacattaaaaatttcgttagattccagctgagcacgagtatagcagcattaactttaatctcattggctacattaatgaactttcctaatcctctcaatgccatgcagattttgtggatcaatattattatggatggacccccagctcagagccttggagtagaaccagtggataaagatgtcattcgtaaacctcctcgcaactggaaagacagcattttgactaaaaacttgatacttaaaatacttgtttcatcaataatcattgtttgtgggactttgtttgtcttctggcgtgagctacgagacaatgtgattacacctcgagacacaacaatgaccttcacatgctttgtgttttttgacatgttcaatgcactaagttccagatcccagaccaagtctgtgtttgagattggactctgcagtaatagaatgttttgctatgcagttcttggatccatcatgggacaattactagttatttactttcctccgcttcagaaggtttttcagactgagagcctaagcatactggatctgttgtttcttttgggtctcacctcatcagtgtgcatagtggcagaaattataaagaaggttgaaaggagcagggaaaagatccagaagcatgttagttcgacatcatcatcttttcttgaagtatga

SEQ ID NO: 208 - protein, 903 aa, Homo sapiens
MIPVLTSKKASELPVSEVASILQADLQNGLNKCEVSHRRAFHGWNEFDISEDEPLWKKYISQFKNPLIMLLLASAVISVLMHQFDDAVSITVAILIVVTVAFVQEYRSEKSLEELSKLVPPECHCVREGKLEHTLARDLVPGDTVCLSVGDRVPADLRLFEAVDLSIDESSLTGETTPCSKVTAPQPAATNGDLASRSNIAFMGTLVRCGKAKGVVIGTGENSEFGEVFKMMQAEEAPKTPLQKSMDLLGKQLSFYSFGIIGIIMLVGWLLGKDILEMFTISVSLAVAAIPEGLPIVVTVTLALGVMRMVKKRAIVKKLPIVETLGCCNVICSDKTGTLTKNEMTVTHIFTSDGLHAEVTGVGYNQFGEVIVDGDVVHGFYNPAVSRIVEAGCVCNDAVIRNNTLMGKPTEGALIALAMKMGLDGLQQDYIRKAEYPFSSEQKWMAVKCVHRTQQDRPEICFMKGAYEQVIKYCTTYQSKGQTLTLTQQQRDVYQQEKARMGSAGLRVLALASGPELGQLTFLGLVGIIDPPRTGVKEAVTTLIASGVSIKMITGDSQETAVAIASRLGLYSKTSQSVSGEEIDAMDVQQLSQIVPKVAVFYRASPRHKMKIIKSLQKNGSVVAMTGDGVNDAVALKAADIGVAMGQTGTDVCKEAADMILVDDDFQTIMSAIEEGKGIYNNIKNFVRFQLSTSIAALTLISLATLMNFPNPLNAMQILWINIIMDGPPAQSLGVEPVDKDVIRKPPRNWKDSILTKNLILKILVSSIIIVCGTLFVFWRELRDNVITPRDTTMTFTCFVFFDMFNALSSRSQTKSVFEIGLCSNRMFCYAVLGSIMGQLLVIYFPPLQKVFQTESLSILDLLFLLGLTSSVCIVAEIIKKVERSREKIQKHVSSTSSSFLEV

SEQ ID NO: 209 - DNA, 1284 bp, Homo sapiens
atgggctaccagaggcaggagcctgtcatcccgccgcagagaggattgccttattcaatgaagcaagctgggtttcctttgggaatattgcttttattctgggtttcatatgttacagacttttcccttgttttattgataaaaggaggggccctctctggaacagatacctaccagtctttggtcaataaaactttcggctttccagggtatctgctcctctctgttcttcagtttttgtatccttttatagcaatgataagttacaatataatagctggagatactttgagcaaagtttttcaaagaatcccaggagttgatcctgaaaacgtgtttattggtcgccacttcattattggactttccacagttacctttactctgcctttatccttgtaccgaaatatagcaaagcttggaaaggtctccctcatctctacaggtttaacaactctgattcttggaattgtaatggcaagggcaatttcactgggtccacacataccaaaaacagaagacgcttgggtatttgcaaagcccaatgccattcaagcggtcggggttatgtcttttgcatttatttgccaccataactccttcttagtttacagttctctagaagaacccacagtagctaagtggtcccgccttatccatatgtccatcgtgatttctgtatttatctgtatattctttgctacatgtggatacttgacatttactggcttcacccaaggggacttatttgaaaattactgcagaaatgatgacctggtaacatttggaagattttgttatggtgtcactgtcattttgacataccctatggaatgctttgtgacaagagaggtaattgccaatgtgttttttggtgggaatctttcatcggttttccacattgttgtaacagtgatggtcatcactgtagccacgcttgtgtcattgctgattgattgcctcgggatagttctagaactcaatggtgtgctctgtgcaactcccctcatttttatcattccatcagcctgttatctgaaactgtctgaagaaccaaggacacactccgataagattatgtcttgtgtcatgcttcccattggtgctgtggtgatggtttttggattcgtcatggctattacaaatactcaagactgcacccatgggcaggaaatgttctactgctttcctgacaatttctctctcacaaatacctcagagtctcatgttcagcagacaacacaactttctactttaaatattagtatctttcaactcgagtaa

SEQ ID NO: 210 - protein, 427 aa, Homo sapiens
MGYQRQEPVIPPQRGLPYSMKQAGFPLGILLLFWVSYVTDFSLVLLIKGGALSGTDTYQSLVNKTFGFPGYLLLSVLQFLYPFIAMISYNIIAGDTLSKVFQRIPGVDPENVFIGRHFIIGLSTVTFTLPLSLYRNIAKLGKVSLISTGLTTLILGIVMARAISLGPHIPKTEDAWVFAKPNAIQAVGVMSFAFICHHNSFLVYSSLEEPTVAKWSRLIHMSIVISVFICIFFATCGYLTFTGFTQGDLFENYCRNDDLVTFGRFCYGVTVILTYPMECFVTREVIANVFFGGNLSSVFHIVVTVMVITVATLVSLLIDCLGIVLELNGVLCATPLIFIIPSACYLKLSEEPRTHSDKIMSCVMLPIGAVVMVFGFVMAITNTQDCTHGQEMFYCFPDNFSLTNTSESHVQQTTQLSTLNISIFQLE

SEQ ID NO: 211 - DNA, 1203 bp, Homo sapiens
atgggctaccagaggcaggagcctgtcatcccgccgcagttttcccttgttttattgataaaaggaggggccctctctggaacagatacctaccagtctttggtcaataaaactttcggctttccagggtatctgctcctctctgttcttcagtttttgtatccttttatagcaatgataagttacaatataatagctggagatactttgagcaaagtttttcaaagaatcccaggagttgatcctgaaaacgtgtttattggtcgccacttcattattggactttccacagttacctttactctgcctttatccttgtaccgaaatatagcaaagcttggaaaggtctccctcatctctacaggtttaacaactctgattcttggaattgtaatggcaagggcaatttcactgggtccacacataccaaaaacagaagacgcttgggtatttgcaaagcccaatgccattcaagcggtcggggttatgtcttttgcatttatttgccaccataactccttcttagtttacagttctctagaagaacccacagtagctaagtggtcccgccttatccatatgtccatcgtgatttctgtatttatctgtatattctttgctacatgtggatacttgacatttactggcttcacccaaggggacttatttgaaaattactgcagaaatgatgacctggtaacatttggaagattttgttatggtgtcactgtcattttgacataccctatggaatgctttgtgacaagagaggtaattgccaatgtgttttttggtgggaatctttcatcggttttccacattgttgtaacagtgatggtcatcactgtagccacgcttgtgtcattgctgattgattgcctcgggatagttctagaactcaatggtgtgctctgtgcaactcccctcatttttatcattccatcagcctgttatctgaaactgtctgaagaaccaaggacacactccgataagattatgtcttgtgtcatgcttcccattggtgctgtggtgatggtttttggattcgtcatggctattacaaatactcaagactgcacccatgggcaggaaatgttctactgctttcctgacaatttctctctcacaaatacctcagagtctcatgttcagcagacaacacaactttctactttaaatattagtatctttcaactcgagtaa

SEQ ID NO: 212 - protein, 400 aa, Homo sapiens
MGYQRQEPVIPPQFSLVLLIKGGALSGTDTYQSLVNKTFGFPGYLLLSVLQFLYPFIAMISYNIIAGDTLSKVFQRIPGVDPENVFIGRHFIIGLSTVTFTLPLSLYRNIAKLGKVSLISTGLTTLILGIVMARAISLGPHIPKTEDAWVFAKPNAIQAVGVMSFAFICHHNSFLVYSSLEEPTVAKWSRLIHMSIVISVFICIFFATCGYLTFTGFTQGDLFENYCRNDDLVTFGRFCYGVTVILTYPMECFVTREVIANVFFGGNLSSVFHIVVTVMVITVATLVSLLIDCLGIVLELNGVLCATPLIFIIPSACYLKLSEEPRTHSDKIMSCVMLPIGAVVMVFGFVMAITNTQDCTHGQEMFYCFPDNFSLTNTSESHVQQTTQLSTLNISIFQLE

SEQ ID NO: 213 - DNA, 1140 bp, Homo sapiens
atgggctaccagaggcaggagcctgtcatcccgccgcaggtcaataaaactttcggctttccagggtatctgctcctctctgttcttcagtttttgtatccttttatagcaatgataagttacaatataatagctggagatactttgagcaaagtttttcaaagaatcccaggagttgatcctgaaaacgtgtttattggtcgccacttcattattggactttccacagttacctttactctgcctttatccttgtaccgaaatatagcaaagcttggaaaggtctccctcatctctacaggtttaacaactctgattcttggaattgtaatggcaagggcaatttcactgggtccacacataccaaaaacagaagacgcttgggtatttgcaaagcccaatgccattcaagcggtcggggttatgtcttttgcatttatttgccaccataactccttcttagtttacagttctctagaagaacccacagtagctaagtggtcccgccttatccatatgtccatcgtgatttctgtatttatctgtatattctttgctacatgtggatacttgacatttactggcttcacccaaggggacttatttgaaaattactgcagaaatgatgacctggtaacatttggaagattttgttatggtgtcactgtcattttgacataccctatggaatgctttgtgacaagagaggtaattgccaatgtgttttttggtgggaatctttcatcggttttccacattgttgtaacagtgatggtcatcactgtagccacgcttgtgtcattgctgattgattgcctcgggatagttctagaactcaatggtgtgctctgtgcaactcccctcatttttatcattccatcagcctgttatctgaaactgtctgaagaaccaaggacacactccgataagattatgtcttgtgtcatgcttcccattggtgctgtggtgatggtttttggattcgtcatggctattacaaatactcaagactgcacccatgggcaggaaatgttctactgctttcctgacaatttctctctcacaaatacctcagagtctcatgttcagcagacaacacaactttctactttaaatattagtatctttcaactcgagtaa

SEQ ID NO: 214 - protein, 379 aa, Homo sapiens
MGYQRQEPVIPPQVNKTFGFPGYLLLSVLQFLYPFIAMISYNIIAGDTLSKVFQRIPGVDPENVFIGRHFIIGLSTVTFTLPLSLYRNIAKLGKVSLISTGLTTLILGIVMARAISLGPHIPKTEDAWVFAKPNAIQAVGVMSFAFICHHNSFLVYSSLEEPTVAKWSRLIHMSIVISVFICIFFATCGYLTFTGFTQGDLFENYCRNDDLVTFGRFCYGVTVILTYPMECFVTREVIANVFFGGNLSSVFHIVVTVMVITVATLVSLLIDCLGIVLELNGVLCATPLIFIIPSACYLKLSEEPRTHSDKIMSCVMLPIGAVVMVFGFVMAITNTQDCTHGQEMFYCFPDNFSLTNTSESHVQQTTQLSTLNISIFQLE

SEQ ID NO: 215 - DNA, 1389 bp, Homo sapiens
atgggctaccagaggcaggagcctgtcatcccgccgcagagagatttagatgacagagaaacccttgtttctgaacatgagtataaagagaaaacctgtcagtctgctgctctttttaatgttgtcaactcgattataggatctggtataataggattgccttattcaatgaagcaagctgggtttcctttgggaatattgcttttattctgggtttcatatgttacagacttttcccttgttttattgataaaaggaggggccctctctggaacagatacctaccagtctttggtcaataaaactttcggctttccagggtatctgctcctctctgttcttcagtttttgtatccttttatagcaatgataagttacaatataatagctggagatactttgagcaaagtttttcaaagaatcccaggagttgatcctgaaaacgtgtttattggtcgccacttcattattggactttccacagttacctttactctgcctttatccttgtaccgaaatatagcaaagcttggaaaggtctccctcatctctacaggtttaacaactctgattcttggaattgtaatggcaagggcaatttcactgggtccacacataccaaaaacagaagacgcttgggtatttgcaaagcccaatgccattcaagcggtcggggttatgtcttttgcatttatttgccaccataactccttcttagtttacagttctctagaagaacccacagtagctaagtggtcccgccttatccatatgtccatcgtgatttctgtatttatctgtatattctttgctacatgtggatacttgacatttactggcttcacccaaggggacttatttgaaaattactgcagaaatgatgacctggtaacatttggaagattttgttatggtgtcactgtcattttgacataccctatggaatgctttgtgacaagagaggtaattgccaatgtgttttttggtgggaatctttcatcggttttccacattgttgtaacagtgatggtcatcactgtagccacgcttgtgtcattgctgattgattgcctcgggatagttctagaactcaatggtgtgctctgtgcaactcccctcatttttatcattccatcagcctgttatctgaaactgtctgaagaaccaaggacacactccgataagattatgtcttgtgtcatgcttcccattggtgctgtggtgatggtttttggattcgtcatggctattacaaatactcaagactgcacccatgggcaggaaatgttctactgctttcctgacaatttctctctcacaaatacctcagagtctcatgttcagcagacaacacaactttctactttaaatattagtatctttcaatga

SEQ ID NO: 216 - protein, 462 aa, Homo sapiens
MGYQRQEPVIPPQRDLDDRETLVSEHEYKEKTCQSAALFNVVNSIIGSGIIGLPYSMKQAGFPLGILLLFWVSYVTDFSLVLLIKGGALSGTDTYQSLVNKTFGFPGYLLLSVLQFLYPFIAMISYNIIAGDTLSKVFQRIPGVDPENVFIGRHFIIGLSTVTFTLPLSLYRNIAKLGKVSLISTGLTTLILGIVMARAISLGPHIPKTEDAWVFAKPNAIQAVGVMSFAFICHHNSFLVYSSLEEPTVAKWSRLIHMSIVISVFICIFFATCGYLTFTGFTQGDLFENYCRNDDLVTFGRFCYGVTVILTYPMECFVTREVIANVFFGGNLSSVFHIVVTVMVITVATLVSLLIDCLGIVLELNGVLCATPLIFIIPSACYLKLSEEPRTHSDKIMSCVMLPIGAVVMVFGFVMAITNTQDCTHGQEMFYCFPDNFSLTNTSESHVQQTTQLSTLNISIFQ

SEQ ID NO: 217 - DNA, 3501 bp, Homo sapiens
atggaggatgccttcggggcagccgtggtgaccgtgtgggacagcgatgcacacaccacggagaagcccaccgatgcctacggagagctggacttcacgggggccggccgcaagcacagcaatttcctccggctctctgaccgaacggatccagctgcagtttatagtctggtcacacgcacatggggcttccgtgccccgaacctggtggtgtcagtgctggggggatcggggggccccgtcctccagacctggctgcaggacctgctgcgtcgtgggctggtgcgggctgcccagagcacaggagcctggattgtcactgggggtctgcacacgggcatcggccggcatgttggtgtggctgtacgggaccatcagatggccagcactgggggcaccaaggtggtggccatgggtgtggccccctggggtgtggtccggaatagagacaccctcatcaaccccaagggctcgttccctgcgaggtaccggtggcgcggtgacccggaggacggggtccagtttcccctggactacaactactcggccttcttcctggtggacgacggcacacacggctgcctggggggcgagaaccgcttccgcttgcgcctggagtcctacatctcacagcagaagacgggcgtgggagggactggaattgacatccctgtcctgctcctcctgattgatggtgatgagaagatgttgacgcgaatagagaacgccacccaggctcagctcccatgtctcctcgtggctggctcagggggagctgcggactgcctggcggagaccctggaagacactctggccccagggagtgggggagccaggcaaggcgaagcccgagatcgaatcaggcgtttctttcccaaaggggaccttgaggtcctgcaggcccaggtggagaggattatgacccggaaggagctcctgacagtctattcttctgaggatgggtctgaggaattcgagaccatagttttgaaggcccttgtgaaggcctgtgggagctcggaggcctcagcctacctggatgagctgcgtttggctgtggcttggaaccgcgtggacattgcccagagtgaactctttcggggggacatccaatggcggtccttccatctcgaagcttccctcatggacgccctgctgaatgaccggcctgagttcgtgcgcttgctcatttcccacggcctcagcctgggccacttcctgaccccgatgcgcctggcccaactctacagcgcggcgccctccaactcgctcatccgcaaccttttggaccaggcgtcccacagcgcaggcaccaaagccccagccctaaaagggggagctgcggagctccggccccctgacgtggggcatgtgctgaggatgctgctggggaagatgtgcgcgccgaggtacccctccgggggcgcctgggaccctcacccaggccagggcttcggggagagcatgtatctgctctcggacaaggccacctcgccgctctcgctggatgctggcctcgggcaggccccctggagcgacctgcttctttgggcactgttgctgaacagggcacagatggccatgtacttctgggagatgggttccaatgcagtttcctcagctcttggggcctgtttgctgctccgggtgatggcacgcctggagcctgacgctgaggaggcagcacggaggaaagacctggcgttcaagtttgaggggatgggcgttgacctctttggcgagtgctatcgcagcagtgaggtgagggctgcccgcctcctcctccgtcgctgcccgctctggggggatgccacttgcctccagctggccatgcaagctgacgcccgtgccttctttgcccaggatggggtacagtctctgctgacacagaagtggtggggagatatggccagcactacacccatctgggccctggttctcgccttcttttgccctccactcatctacacccgcctcatcaccttcaggaaatcagaagaggagcccacacgggaggagctagagtttgacatggatagtgtcattaatggggaagggcctgtcgggacggcggacccagccgagaagacgccgctgggggtcccgcgccagtcgggccgtccgggttgctgcgggggccgctgcggggggcgccggtgcctacgccgctggttccacttctggggcgcgccggtgaccatcttcatgggcaacgtggtcagctacctgctgttcctgctgcttttctcgcgggtgctgctcgtggatttccagccggcgccgcccggctccctggagctgctgctctatttctgggctttcacgctgctgtgcgaggaactgcgccagggcctgagcggaggcgggggcagcctcgccagcgggggccccgggcctggccatgcctcactgagccagcgcctgcgcctctacctcgccgacagctggaaccagtgcgacctagtggctctcacctgcttcctcctgggcgtgggctgccggctgaccccgggtttgtaccacctgggccgcactgtcctctgcatcgacttcatggttttcacggtgcggctgcttcacatcttcacggtcaacaaacagctggggcccaagatcgtcatcgtgagcaagatgatgaaggacgtgttcttcttcctcttcttcctcggcgtgtggctggtagcctatggcgtggccacggaggggctcctgaggccacgggacagtgacttcccaagtatcctgcgccgcgtcttctaccgtccctacctgcagatcttcgggcagattccccaggaggacatggacgtggccctcatggagcacagcaactgctcgtcggagcccggcttctgggcacaccctcctggggcccaggcgggcacctgcgtctcccagtatgccaactggctggtggtgctgctcctcgtcatcttcctgctcgtggccaacatcctgctggtcaacttgctcattgccatgttcagttacacattcggcaaagtacagggcaacagcgatctctactggaaggcgcagcgttaccgcctcatccgggaattccactctcggcccgcgctggccccgccctttatcgtcatctcccacttgcgcctcctgctcaggcaattgtgcaggcgaccccggagcccccagccgtcctccccggccctcgagcatttccgggtttacctttctaaggaagccgagcggaagctgctaacgtgggaatcggtgcataaggagaactttctgctggcacgcgctagggacaagcgggagagcgactccgagcgtctgaagcgcacgtcccagaaggtggacttggcactgaaacagctgggacacatccgcgagtacgaacagcgcctgaaagtgctggagcgggaggtccagcagtgtagccgcgtcctggggtgggtggccgaggccctgagccgctctgccttgctgcccccaggtgggccgccaccccctgacctgcctgggtccaaagactga

SEQ ID NO: 218 - protein, 1166 aa, Homo sapiens [sequence omitted]

SEQ ID NO: 219 - DNA, 894 bp, Homo sapiens
atggagccgcgggcgctcgtcacggcgctcagcctcggcctcagcctgtgctccctggggctgctcgtcacggccatcttcaccgaccactggtacgagaccgacccccggcgccacaaggagagctgcgagcgcagccgcgcgggcgccgaccccccggaccagaagaaccgcctgatgccgctgtcgcacctgccgctgcgggactcgcccccgctggggcgccggctgctcccgggcggcccggggcgcgccgaccccgagtcctggcgctcgctcctggggctcggcgggctggacgccgagtgcggccggcccctcttcgccacctactcgggcctctggaggaagtgctacttcctgggcatcgaccgggacatcgacaccctcatcctgaaaggtattgcgcagcgatgcacggccatcaagtaccacttttctcagcccatccgcttgcgaaacattccttttaatttaaccaagaccatacagcaagatgagtggcacctgcttcatttaagaagaatcactgctggcttcctcggcatggccgtagccgtccttctctgcggctgcattgtggccacagtcagtttcttctgggaggagagcttgacccagcacgtggctggactcctgttcctcatgacagggatattttgcaccatttccctctgtacttatgccgccagtatctcgtatgatttgaaccggctcccaaagctaatttatagcctgcctgctgatgtggaacatggttacagctggtccatcttttgcgcctggtgcagtttaggctttattgtggcagctggaggtctctgcatcgcttatccgtttattagccggaccaagattgcacagctaaagtctggcagagactccacggtatga

SEQ ID NO: 220 - protein, 297 aa, Homo sapiens
MEPRALVTALSLGLSLCSLGLLVTAIFTDHWYETDPRRHKESCERSRAGADPPDQKNRLMPLSHLPLRDSPPLGRRLLPGGPGRADPESWRSLLGLGGLDAECGRPLFATYSGLWRKCYFLGIDRDIDTLILKGIAQRCTAIKYHFSQPIRLRNIPFNLTKTIQQDEWHLLHLRRITAGFLGMAVAVLLCGCIVATVSFFWEESLTQHVAGLLFLMTGIFCTISLCTYAASISYDLNRLPKLIYSLPADVEHGYSWSIFCAWCSLGFIVAAGGLCIAYPFISRTKIAQLKSGRDSTV

SEQ ID NO: 221 - DNA, 1134 bp, Homo sapiens
atgaggcgactgaatcggaaaaaaactttaagtttggtaaaagagttggatgcctttccgaaggttcctgagagctatgtagagacttcagccagtggaggtacagtttctctaatagcatttacaactatggctttattaaccataatggaattctcagtatatcaagatacatggatgaagtatgaatacgaagtagacaaggatttttctagcaaattaagaattaatatagatattactgttgccatgaagtgtcaatatgttggagcggatgtattggatttagcagaaacaatggttgcatctgcagatggtttagtttatgaaccaacagtatttgatctttcaccacagcagaaagagtggcagaggatgctgcagctgattcagagtaggctacaagaagagcattcacttcaagatgtgatatttaaaagtgcttttaaaagtacatcaacagctcttccaccaagagaagatgattcatcacagtctccaaatgcatgcagaattcatggccatctatatgtcaataaagtagcagggaattttcacataacagtgggcaaggcaattccacatcctcgtggtcatgcacatttggcagcacttgtcaaccatgaatcttacaatttttctcatagaatagatcatttgtcttttggagagcttgttccagcaattattaatcctttagatggaactgaaaaaattgctatagatcacaaccagatgttccaatattttattacagttgtgccaacaaaactacatacatataaaatatcagcagacacccatcagttttctgtgacagaaagggaacgtatcattaaccatgctgcaggcagccatggagtctctgggatatttatgaaatatgatctcagttctcttatggtgacagttactgaggagcacatgccattctggcagttttttgtaagactctgtggtattgttggaggaatcttttcaacaacaggcatgttacatggaattggaaaatttatagttgaaataatttgctgtcgtttcagacttggatcctataaacctgtcaattctgttccttttgaggatggccacacagacaaccacttacctcttttagaaaataatacacattga

SEQ ID NO: 222 - protein, 377 aa, Homo sapiens
MRRLNRKKTLSLVKELDAFPKVPESYVETSASGGTVSLIAFTTMALLTIMEFSVYQDTWMKYEYEVDKDFSSKLRINIDITVAMKCQYVGADVLDLAETMVASADGLVYEPTVFDLSPQQKEWQRMLQLIQSRLQEEHSLQDVIFKSAFKSTSTALPPREDDSSQSPNACRIHGHLYVNKVAGNFHITVGKAIPHPRGHAHLAALVNHESYNFSHRIDHLSFGELVPAIINPLDGTEKIAIDHNQMFQYFITVVPTKLHTYKISADTHQFSVTERERIINHAAGSHGVSGIFMKYDLSSLMVTVTEEHMPFWQFFVRLCGIVGGIFSTTGMLHGIGKFIVEIICCRFRLGSYKPVNSVPFEDGHTDNHLPLLENNTH

SEQ ID NO: 223 - DNA, 3407 bp, Homo sapiens
cgcgcgtctccgccgcccgcgtgacttctgcctgcgctccttctctgaacgctcacttccgaggagacgccgacgatgaagacaccgtggaagattcttctgggactgctgggtgctgctgcgcttgtcaccatcatcaccgtgcccgtggttctgctgaacaaaggcacagatgatgctacagctgacagtcgcaaaacttacactctaactgattacttaaaaaatacttatagactgaagttatactccttaagatggatttcagatcatgaatatctctacaaacaagaaaataatatcttggtattcaatgctgaatatggaaacagctcagttttcttggagaacagtacatttgatgagtttggacattctatcaatgattattcaatatctcctgatgggcagtttattctcttagaatacaactacgtgaagcaatggaggcattcctacacagcttcatatgacatttatgatttaaataaaaggcagctgattacagaagagaggattccaaacaacacacagtgggtcacatggtcaccagtgggtcataaattggcatatgtttggaacaatgacatttatgttaaaattgaaccaaatttaccaagttacagaatcacatggacggggaaagaagatataatatataatggaataactgactgggtttatgaagaggaagtcttcagtgcctactctgctctgtggtggtctccaaacggcacttttttagcatatgcccaatttaacgacacagaagtcccacttattgaatactccttctactctgatgagtcactgcagtacccaaagactgtacgggttccatatccaaaggcaggagctgtgaatccaactgtaaagttctttgttgtaaatacagactctctcagctcagtcaccaatgcaacttccatacaaatcactgctcctgcttctatgttgataggggatcactacttgtgtgatgtgacatgggcaacacaagaaagaatttctttgcagtggctcaggaggattcagaactattcggtcatggatatttgtgactatgatgaatccagtggaagatggaactgcttagtggcacggcaacacattgaaatgagtactactggctgggttggaagatttaggccttcagaacctcattttacccttgatggtaatagcttctacaagatcatcagcaatgaagaaggttacagacacatttgctatttccaaatagataaaaaagactgcacatttattacaaaaggcacctgggaagtcatcgggatagaagctctaaccagtgattatctatactacattagtaatgaatataaaggaatgccaggaggaaggaatctttataaaatccaacttattgactatacaaaagtgacatgcctcagttgtgagctgaatccggaaaggtgtcagtactattctgtgtcattcagtaaagaggcgaagtattatcagctgagatgttccggtcctggtctgcccctctatactctacacagcagcgtgaatgataaagggctgagagtcctggaagacaattcagctttggataaaatgctgcagaatgtccagatgccctccaaaaaactggacttcattattttgaatgaaacaaaattttggtatcagatgatcttgcctcctcattttgataaatccaagaaatatcctctactattagatgtgtatgcaggcccatgtagtcaaaaagcagacactgtcttcagactgaactgggccacttaccttgcaagcacagaaaacattatagtagctagctttgatggcagaggaagtggttaccaaggagataagatcatgcatgcaatcaacagaagactgggaacatttgaagttgaagatcaaattgaagcagccagacaattttcaaaaatgggatttgtggacaacaaacgaattgcaatttggggctggtcatatggagggtacgtaacctcaatggtcctgggatcgggaagtggcgtgttcaagtgtggaatagccgtggcgcctgtatcccggtgggagtactatgactcagtgtacacagaacgttacatgggtctcccaactccagaagacaaccttgaccattacagaaattcaacagtcatgagcagagctgaaaattttaaacaagttgagtacctccttattcatggaacagcagatgataacgttcactttcagcagtcagctcagatctccaaagccctggtcgatgttggagtggatttccaggcaatgtggtatactgatgaagaccatggaatagctagcagcacagcacaccaacatatatatacccacatgagccacttcataaaacaatgtttctctttaccttagcacctcaaaataccatgccatttaaagcttattaaaactcatttttgttttcattatctcaaaactgcactgtcaagatgatgatgatctttaaaatacacactcaaatcaagaaacttaaggttacctttgttcccaaatttcatacctatcatcttaagtagggacttctgtcttcacaacagattattaccttacagaagtttgaattatccggtcgggttttattgtttaaaatcatttctgcatcagctgctgaaacaacaaataggaattgtttttatggaggctttgcatagattccctgagcaggattttaatctttttctaactggactggttcaaatgttgttctcttctttaaagggatggcaagatgtgggcagtgatgtcactagggcagggacaggataagagggattagggagagaagatagcagggcatggctgggaacccaagtccaagcataccaacacgagcaggctactgtcagctcccctcggagaagagctgttcaccacgagactggcacagttttctgagaaagactattcaaacagtctcaggaaatcaaatatcgaaagcactgacttctaagtaaaccacagcagttgaaagactccaaagaaatgtaagggaaactgccagcaacgcagcccccaggtgccagttatggctataggtgctacaaaaacacagcaagggtgatgggaaagcattgtaaatgtgcttttaaaaaaaaatactgatgttcctagtgaaagaggcagcttgaaactgagatgtgaacacatcagcttgccctgttaaaagatgaaaatatttgtatcacaaatcttaacttgaaggagtccttgcatcaatttttcttatttcatttctttgagtgtcttaattaaaagaatattttaacttccttggactcattttaaaaaatggaacataaaatacaatgttatgtattattattcccattctacatactatggaatttctcccagtcatttaataaatgtgccttcattttttc

SEQ ID NO: 224 - protein, 766 aa, Homo sapiens [sequence omitted]

SEQ ID NO: 225 - DNA, 261 bp, Homo sapiens
atggctctggcgaaggtgagggagccaaacgcaaatgacaatgccatcagagttgacaacagaagtgtgattaaagtgcgtgctaaccagtgttccctgcatgaggcagaaagtgaatccagaaaccctcaggagctctggatgggcctgctcctcttgatgggggtcctagaagcatgtgtggaaatgaggcctctgtcagtctggtccctgagagatgacaaggagcagagcccccaccagcccacactggatgtctaa

SEQ ID NO: 226 - protein, 86 aa, Homo sapiens
MALAKVREPNANDNAIRVDNRSVIKVRANQCSLHEAESESRNPQELWMGLLLLMGVLEACVEMRPLSVWSLRDDKEQSPHQPTLDV

SEQ ID NO: 227 - DNA, 462 bp, Homo sapiens
atgccaaatgctgagttagaagcaaagagccttggaagcagtaaatgtttaaaaactgctctcatacttgctgtatgttgtggatcagcaaatatagtcagccctctacttgagcaaaatattgatgtatcttctcaagatctggacagacggccagagagtatgctgtttctagtcatcatcatgtggaccagttttgtggaagacaatctttccatgggctgggggaagctagaagattttatggctattgaagaagaaatgaagaagcacggaagtactcatgtgggattcccagaaaacctgactaatggtgccgctgctggcaatggtgatgatggattaattcctccaaggaagagcagaacacctgaaagccagcaatttcctgacactgagaatgaagagtatcacaggtttgtcaaagatcagatagttgtagatatgcggcgttatttctga

SEQ ID NO: 228 - protein, 153 aa, Homo sapiens [sequence omitted]

SEQ ID NO: 229 - DNA, 12880 bp, Homo sapiens
gactgcttgcattaaaggacttcctcatcctttttttcatgaaactgagcttgcttaatcagagatggagcaaactgactgcaaaccctaccagcctctaccaaaagtcaagcatgaaatggatctagcttacaccagttcttctgatgagagtgaagatggaagaaaaccaagacagtcatacaactccagggagaccctgcacgagtataaccaggagctgaggatgaattacaatagccagagtagaaagaggaaagaagtagaaaaatctactcaagagatggaattctgtgaaacctctcacactctgtgctctggctaccaaacagacatgcacagcgtttctcggcatggctaccagctagagatgggatctgatgtggacacagagacagaaggtgctgcctcacctgaccatgcactaagaatgtggataaggggaatgaaatcagagcatagttcctgtttgtccagccgggccaactctgcattatccttgactgacactgaccatgaaaggaagtctgatggggaaaatggtttcaaattctctcctgtttgttgtgacatggaggctcaagctgggtctactcaagatgtgcagagcagcccacacaaccagttcaccttcagacccctcccaccgccacctccgcctcctcatgcctgcacctgtgccaggaagccaccccctgcagcggactctcttcagaggagatcaatgactacccgcagccagcccagcccagctgctccagctcccccaaccagcacgcaggattcagtccatctgcataacagctgggtcctgaacagcaacataccattggagaccaggcattccctgttcaaacatggatctggttcctctgcgatcttcagtgcagccagtcagaactaccctctgacatccaataccgtgtactcgccccctcccaggcctcttcctcgaagcaccttttcccgacctgcctttacctttaacaaaccttacaggtgctgcaactggaagtgcacagcattgagcgccactgcaatcacagtgactttggccttgttactagcctatgtgattgcagtgcatttgttcggcctgacttggcagttgcaaccagttgaaggagagctgtatgcaaatggagttagcaaagggaacagggggaccgagtccatggacactacttactctccaattggaggaaaagtttctgataaatcagagaaaaaagtgtttcagaagggacgggcgatagacactggagaagttgacattggtgcacaggtcatgcagaccattccacctggtttattctggcgtttccagattactatccaccatccaatatatctgaagttcaatatttctttagccaaggactctctgctgggaatttatggcagaagaaacattccacctacacatactcagtttgattttgtaaaactaatggatggcaaacagctggtcaagcaggactccaagggctctgatgatacacagcactcccctcggaacctgatcttaacttcgcttcaggagacaggtttcatagagtatatggatcaaggaccttggtatctggcgttttacaatgatggaaaaaagatggagcaagtattcgtgttaactacagcaattgaaataatggatgactgttcaaccaattgcaatggaaatggagagtgtatctctggccattgtcattgtttcccaggattccttggacctgactgtgctagagattcctgccctgtgctgtgtggtgggaatggagaatacgagaaaggacactgtgtctgccggcatggctggaaggggccagagtgtgacgttccggaagaacaatgcattgatccaacatgctttggccacggcacctgcatcatgggagtctgcatctgtgtgccaggatacaaaggagaaatatgcgaggaagaggactgcctagacccaatgtgttccaaccatggcatctgtgtaaaaggagaatgtcactgttctactggctggggaggagttaactgtgaaacaccacttcctgtatgtcaagagcagtgctcaggacacggaacttttcttctggacgctggagtatgcagctgtgatcccaagtggacaggatctgactgctcaacagagctgtgtaccatggagtgtggtagccatggagtctgctcaagaggaatttgccagtgtgaagaaggctgggtaggaccaacatgtgaggaacgctcctgtcattctcattgtactgagcatggccaatgcaaagatggaaaatgtgagtgtagccctggatgggagggcgaccactgcacaattgctcactacttagatgctgtccgagatggctgcccagggctctgctttggaaatggacgatgtaccctggatcaaaatggttggcactgtgtgtgtcaggtgggttggagtgggacaggctgcaatgttgtcatggaaatgctttgtggagataacttggacaatgatggagatggtttaaccgactgtgtggatcctgactgttgtcaacaaagcaactgttatataagtcctctctgccagggctcaccagatcctcttgacctcattcagcaaagccaaactctcttctctcagcacacttcaagacttttttatgatcgaatcaaattcctcattggcaaggacagtactcatgtcattcctcctgaggtgtcatttgacagcaggcgtgcctgtgtgattcgaggccaagtggtggccatagatggaactcctctagtgggagtgaatgtcagtttcttgcaccacagtgattatgggtttaccatcagccggcaagatggaagctttgacctcgtggccatcggtggcatctctgtcatcttaatcttcgaccgatcccctttcctgcctgagaagagaacactctggttgccttggaatcagtttattgtggtagagaaagtcaccatgcagagagttgtatcagacccgccatcctgcgatatctccaactttatcagcccaaaccctattgtgcttccttcaccgctcacatcatttggagggtcctgtccagagaggggaactattgttcctgagctgcaggttgtacaggaggaaattcccattccctccagctttgtgaggctgagttacctgagcagccgcacccctgggtataaaaccctgctacggatccttctgacacattcaacgattcccgtaggcatgataaaagtacacctcacagtagctgtggaagggcgactcacacagaagtggtttcccgccgcaattaatcttgtctacacatttgcttggaacaagaccgatatctatggacagaaggtttggggcctggcagaggctttggtatctgtgggatatgaatatgaaacgtgccctgactttattctctgggagcaaaggacagtcgttttacaaggttttgagatggatgcttctaacctaggagactggtctttgaataagcatcacattttgaatcctcaaagtggaatcatacataaagggaatggagaaaatatgttcatttcccagcagcccccagtcatatcaaccataatgggtaatggacaccaaaggagtgtagcctgcaccaactgcaatggcccagcccacaacaacaaactctttgctcctgtcgccttagcttctggccctgatggcagtgtgtatgttggcgacttcaattttgtaaggagaatatttccctcgggaaactccgttagtattttggaattaagcacaagtcctgctcacaaatactatctggctatggaccctgtgtctgaatcactctatctatcagacaccaatactcgcaaagtctacaagttgaaatctcttgtggagacgaaagatctgtccaagaattttgaagtggtggcaggaactggtgatcagtgccttccctttgaccagagtcattgtggagatggtgggagagcatcggaagcttcactgaatagccctcgaggcatcacagttgataggcatggatttatttactttgtggatgggactatgattcgcaaaattgatgagaatgctgtgatcacaactgtaatcggctcaaatggtctgacttccacacaaccactgagctgtgactcaggaatggacatcactcaggtgcgattagagtggccaacagaccttgcagtaaatcctatggacaattcattgtatgtcttggataacaacattgtgctgcaaatttctgagaacaggcgtgttcggatcatcgcaggacgccccattcactgccaggtgccaggcatcgatcatttcctggtcagcaaggtagcaattcactccactctagagtcagcgagggccatcagtgtctcccacagcgggctgctcttcatagctgaaacagacgagaggaaagtaaaccgcattcagcaagtaaccaccaatggggagatctacatcatcgctggtgcccccactgactgtgactgcaaaattgatccaaactgtgactgtttttcaggtgatggtggctatgccaaagatgcaaagatgaaagccccttcctccttagcagtgtcgcctgatggaaccctctatgtggcagacctcggaaatgttcgaattcgtaccatcagcaggaaccaagcccacctgaatgacatgaacatttatgagattgcttcacccgctgatcaggaactgtaccagttcactgtaaatggaacccacctacacaccctgaacttgataacaagggactatgtttataacttcacctacaattctgaaggtgacttgggcgcgattaccagcagcaatggcaattcagtgcacattcgccgtgatgcaggcggaatgccgctatggcttgtggtgcctggcggacaagtatactggctgactataagcagcaatggagtcctgaaaagagtgtcagcccaaggctataatccggccttaatgacctatccaggaaacacagggcttctggctaccaaaagtaacgaaaatggatggacaaccgtttatgagtatgaccccgagggacacctgaccaatgcaacgtttcccactggagaggtcagcagcttccacagtgacctggagaagctgacaaaagtggagctagatacttccaaccgtgaaaatgtcctcatgtcaaccaacttgacggcaactagtaccatatatattttaaaacaagaaaatactcaaagtacctatcgggtgaatccagatggttccctgcgtgtcacttttgccagcgggatggagatcggcctcagctcagagccccacatcctggcaggggcagtcaaccctaccctgggcaaatgcaacatctcattgcccggagagcacaatgcaaacctcatcgagtggcggcagaggaaggagcaaaacaaaggcaatgtttcggcttttgaaaggaggctgagggcccacaacagaaacctactctccatagattttgatcatataacccgcacaggaaagatctatgatgaccatcgaaaattcacccttcgaattctttatgaccagactgggcgacccattctgtggtctcctgtaagcagatataatgaagtgaacatcacatattcaccttcgggattggtgacgtttattcaaagaggaacgtggaatgaaaaaatggaatatgaccagagtgggaaaattatttcaagaacttgggctgatgggaaaatttggagctatacctacttagaaaaatctgtgatgcttctcctacacagccagcggcgttacatctttgagtatgaccaatcagattgcctgctgtcagttaccatgcctagcatggtgcgccacagcttacaaaccatgctttcagtgggctactaccgtaatatctacaccccaccggacagtagcacttcttttatccaagactatagtcgagatggccgattgctacagaccctgcatctggggacagggcgcagagtcttatacaagtacaccaagcaagcaaggctttctgaggttctctatgataccactcaggtcacattaacatatgaagagtcttctggagtgattaagacaatacacctgatgcatgacggattcatctgcacaatcagatacaggcaaacaggacctcttattggacgccagattttcagattcagtgaagaaggccttgtgaatgcacggttcgactacagctacaacaatttccgagtcacaagcatgcaagctgtaatcaatgaaacccctttgcctatagatctttaccgatatgttgatgtctctggcagaacagagcagtttggaaaattcagtgtaattaattacgatttaaatcaggtcataactactacagtgatgaaacacaccaaaatcttcagtgccaatggacaagtcattgaagtccaatatgaaatcctaaaggcaattgcctactggatgaccattcaatatgataatgtgggccgacatggtaatatgtgcataagggtaggagtagatgccaatataacaaggtacttctatgaatacgatgctgatgggcaacttcagactgtttctgtaaatgacaaaacccagtggcgttatagttacgatctgaatggagacatcaacctcttaagccatgggaagagtgctcgtcttactcctctccgatatgacctccgagaccgcatcaccagattaggagaaattcagtataaaatggatgaagatggctttctgaggcagaggggaaatgatatttttgaatataattctaatggcctgctgcagaaagcctacaataaggcttctggctggactgtgcagtattactatgatgggcttgggcgacgtgtcgcgagtaagtccagcctagggcagcaccttcagttctttgtcgacgcgaccgcgaaccccataagagttactcatttgtacaaccacacaagctcggagattacatctctgtattatgatctccaaggtcaccttattgccatggagttaagcagtggtgaagaatattatgtagcctgtgataatacaggtaccccactagctgtgttcagcagccgaggtcaggtcataaaggagatactatacacaccttatggcgatatctatcatgacacttaccctgactttcaggtcataattggttttcatggaggactctatgatttccttactaaattagtgcacctggggcaaagggattatgatgttgttgctggcagatggacaacggcctatcatcacatatggaaacagttgaacctccttcctaaaccattcaacctctactcctttgaaaataactacccagttggcaaaattcaagatgttgcaaagtataccacagacatcagaagttggttggagctatttggtttccaattacacaatgtactacctggatttcccaaacctgaattagaaaatttagaattaacttacgagcttctacggcttcagacaaaaactcaagagtgggatcctggaaagactatcctgggcattcagtgtgaactccagaaacagctcaggaatttcatttccttggaccaactacctatgactccccgatacaatgatggacggtgccttgaaggagggaagcaaccaaggtttgctgctgtcccttctgtttttgggaaaggtataaaatttgccatcaaggatggcatagtaacagctgatattataggagtagccaatgaagatagcaggcggcttgctgccattctcaataatgcccattacctggaaaacctacattttaccatagaggggagggacactcactacttcattaagcttgggtctctggaggaagacctggtgctcatcggtaacactggggggaggcggattctggagaatggtgtcaatgtcactgtgtcccagatgacttctctgttgaatgggaggactagacggtttgcagatattcagctccagcatggagccctgtgcttcaacatccggtatgggacaactgtcgaagaggaaaagaatcacgtgttggagattgccagacagcgcgcagtggcccaggcctggactaaggaacaaagaaggctgcaagagggggaagaggggattagggcatggacagaaggggaaaagcagcagcttttgagcactgggcgggtacaaggttacgatgggtattttgttttgtctgttgagcagtatttagaactttctgacagtgccaataatattcactttatgagacagagcgaaataggcaggaggtaacaaaaatatctctgcctttgcgtcaccaaagactgcctgtttttaaaacataaaatggtttattgtattggttttctagatcagaactctgtatatgtaaatatggaggaaaaacatatccaactgcctttcaatgtgacggaagatggtattttaatattgtttgtttaaactctttaagaaatgacagagatttttagttcttgtgtggcagtattcaaaataacacaagtagaactcaaacagctaaaaacagttttcagaaagcaccactttcaatttgccgagccatgcatatgttccaatatccagaaagaacccaaggttctctatctctattgtgagaagcagtttcatccttaactgttggcagaacttacgggctatttgaataggtggtgcaatagtatctgaaacttgcctttcgaaagactgccagccctttgacgttttccagatctgttataggaaacttaaaaacaggtgtaaaatgtcttcagccaccatctcctagagtgaggacccaattgcccttccttcttgattattcctccttgcttgttaaagtaaatgccatattgttgtgctgtgttttggcgtgtggtggctgggttctgtctaccatgcttccctgtgggtgtggtaaccagactgtatagccgctatttgctcgtgtgtacatgataccaaagcagctggccagcgtgacctctctcacacgacctgttttgactcaattttttactaaaagttgttcagctgtattggtatcatgtaaacatagcttttattaacctgggtaggaatttctcatttatatataggatgtgttttggtcatagtttcacattagtgattcagtatctatacactgacccaatggttttgtgcacatgaacggtaatttacttaaaagtatgattctggtacaaaaacaaacaaaggctttagcaggcatacgtgtctgggatgccgatacatacattaactactactgcagaaattcataagagccaaaaccttaaaaaaatagacctggtacttaagtgaaagtactaaagggaagaccagaccaaacatcacagcagttgctgccacattgtttcagcccacttagatttatctttcaaatgtacaattctgtattgaacatctcccagccatcttcaggaaatcgaatcaagtaaatcctttccaaccgaaaacatttcaactaactatagagaggcagactcatttttactaaaataatttatacagttagttattttcgttctccgtacttacccatttatctttatttaatcgtctctactgcctaggaaaataactattttccaggacgggttatttgttctgcgatcatttaaaatttggagaaaggtcaggattagtgttaatatcagctgcagtttctcaatctctaggaatcctgcagtaaaacaagccccttggtgagctggaagatttgtgcccagtgacaaagagatagtttgtaaaatgctgtgtaattgtaagttaccacaaatgaaaatacatgacagcacaatgtggcccgtagaaaattcccctgagccagcttctgcactttcatcaccgaatctgaacatttgctatgtctgaaggcaaatttatgatggaatgttagtttggattctttccagatgctacctaaatgcagtgtggggtcattgccttgctttgcgatgacagtttctttgaaaatatgcaaagtcataagctcatgttaaggtttttcaagagtctgcctcctactacacaaaggaaagcaagggaaaggaaatgaccctggcaaacagtagggaagggtgtattcaaacatttcattttcaaaaccttcgggttagaataccacttacacatgtattctgagagacagaattcatgaggaactcatctctctttataactggaaacacaccagcttgatatattgctaatccatactaaaatcatattattgggttttttctgaatcaggcctgtattaatggtacagtatttattcagaatggaattctaaaattactaacaaacttgttgaaaatttgaatacctccacaccaacctaaaaatggaccttaagttcctagaacctctgatgttcttttaaattaatggaaaaataatttgtgaactgtatatagagagtgcattcataaatgtgattatgtattttatcacaaatccaaaatgtcaatattagagtctattttgcttatattttaagcaattatacgtttttgcaattcattgatgatgtatcattttcaaactgctttaaatatccattagaaacaaatatttgaagcttttacttaatagtgattaccttgaactgtgcatttctagtttgtaatacgtatttggttggttcgtgcctttagtttgttaaagttacatttgtattatattcaggaaatgcactttttattacttacagctgtggttttaatactgccttgaactattattattctttttacaactcctaaagcttgagggaggaaagaaaaaaaaaacaaaactactaatcagtagtaaatcgaagagaaacattttggcatttcttaagaagaagatggagatattgagtatatcacttcctattcagctgaatagaaagaatgccttcattgacttgcagttctgcagtttaaattattgaaagaacaattcgtttgcatttcctgatgaaagtaaaagcatttttcagagaaacatatgaatttctcatacccagcagacagatggctgacactgcacagccacacaccattcgagtaagttaaagtgagagcatagtagttggactctcctatgaagaacattctgggctggaggcagggaatactccatggttgtttctttttcctacttaagcccattttgtttgtgcttttctgttttgttttgttttcactcttgcactacagtctagagatccaaatgaactgaaaagttcaaagtttaacacatttaaatatgtttacttttagttgtcattctaatcgttattgattagaagcatgactcctgaaggaaagggaaataaatctcaattcatactaacttgcaacaaaacacttttaccatataaataagtatatgatttatttttaacccaaaaaatgtataaaataagtgtgtcctttactgtcaatttatcgagaagatctataatatatagactacatatatataatatatacaacatagccaaatgtatgaaaacttgacaatgtataatttggaattcacatgctacctatgtagacaggtatgaaattaagttataattttcatgagacattttcatcactgttgacacagtttcaaggcattccatcatgttattttgactctttttcttttttttttctttaaaaatatatttttaactagaccaggccccactataatatcacttaagagagtcagggcaaagtttttgcatttatgaagatgtgttcatgtaagggtgattgtaatggagttcattggtaatagaagcaaaagtacagtaacgaagtattgaaaagaaaattttggagacattggagcatattatatatagcttgtggaaagacataaggctacagatggaatggaacattcctgttttcttgaagaaattcacatacacatagctgacctgactagtacttcagctcttccacagccttctataaaggttctttcttctgcaaagaaaacaaaacaaaacaaaacaaaacaaaaaaaaacaaaaaaagcgcaaaaaacaaaaaaacaaaaaaaagcaaagtaaaatttaaaaatacagaaaacaaacaacaaaaaagaattcaaccataaatagtgactattattttcagtgtgtccttcatgtgaaagctattaaggaccaaatatactactgttcataagaagaaattactttctaaacagtaactgaaaatacttagagttaaacttgctgtggattttgtcttggcagttgtcatcttacattatttgtcaaaggaaatgtgtttggcagttaaaaatctttccttagatttagtggtggactttaacctcttaaataaatgttagtatatcagattgtgtccttgaaaaatattttacttgtatgaatcatgacaacgtctaaatctttactattcttctggcaaaagcatcagtaagaaagaaggcgaaaaagagaagtatagcctttatgtcagaaaaacattctttttagctgcttactttctcatgaaaagtaaagatgtttacagtgtatgccaagttttcagtttctgtataacaacaggtagaggttctaatcatattgaaaattgtgttataatggtctgagccatgttgctaggaaacaataggttccaattttgtattcctgctctcctgtgctgaaaagtgactggatactgtacaggttcatgttctctggctgcagttaaatggtcttttgcattttgctctggctttcaggccagaagcatgcatttttctacaagagcatcacaacaacatgctgtaaatatttaaagttaaacattatgtgttgatatttgaaagaaaagtactttgaatatttcatttttaaaaaataaaattgccaatgaaaaaaaa

SEQ ID NO: 230 - protein, 2725 aa, Homo sapiens
MEQTDCKPYQPLPKVKHEMDLAYTSSSDESEDGRKPRQSYNSRETLHEYNQELRMNYNSQSRKRKEVEKSTQEMEFCETSHTLCSGYQTDMHSVSRHGYQLEMGSDVDTETEGAASPDHALRMWIRGMKSEHSSCLSSRANSALSLTDTDHERKSDGENGFKFSPVCCDMEAQAGSTQDVQSSPHNQFTFRPLPPPPPPPHACTCARKPPPAADSLQRRSMTTRSQPSPAAPAPPTSTQDSVHLHNSWVLNSNIPLETRHSLFKHGSGSSAIFSAASQNYPLTSNTVYSPPPRPLPRSTFSRPAFTFNKPYRCCNWKCTALSATAITVTLALLLAYVIAVHLFGLTWQLQPVEGELYANGVSKGNRGTESMDTTYSPIGGKVSDKSEKKVFQKGRAIDTGEVDIGAQVMQTIPPGLFWRFQITIHHPIYLKFNISLAKDSLLGIYGRRNIPPTHTQFDFVKLMDGKQLVKQDSKGSDDTQHSPRNLILTSLQETGFIEYMDQGPWYLAFYNDGKKMEQVFVLTTAIEIMDDCSTNCNGNGECISGHCHCFPGFLGPDCARDSCPVLCGGNGEYEKGHCVCRHGWKGPECDVPEEQCIDPTCFGHGTCIMGVCICVPGYKGEICEEEDCLDPMCSNHGICVKGECHCSTGWGGVNCETPLPVCQEQCSGHGTFLLDAGVCSCDPKWTGSDCSTELCTMECGSHGVCSRGICQCEEGWVGPTCEERSCHSHCTEHGQCKDGKCECSPGWEGDHCTIAHYLDAVRDGCPGLCFGNGRCTLDQNGWHCVCQVGWSGTGCNVVMEMLCGDNLDNDGDGLTDCVDPDCCQQSNCYISPLCQGSPDPLDLIQQSQTLFSQHTSRLFYDRIKFLIGKDSTHVIPPEVSFDSRRACVIRGQVVAIDGTPLVGVNVSFLHHSDYGFTISRQDGSFDLVAIGGISVILIFDRSPFLPEKRTLWLPWNQFIVVEKVTMQRVVSDPPSCDISNFISPNPIVLPSPLTSFGGSCPERGTIVPELQVVQEEIPIPSSFVRLSYLSSRTPGYKTLLRILLTHSTIPVGMIKVHLTVAVEGRLTQKWFPAAINLVYTFAWNKTDIYGQKVWGLAEALVSVGYEYETCPDFILWEQRTVVLQGFEMDASNLGDWSLNKHHILNPQSGIIHKGNGENMFISQQPPVISTIMGNGHQRSVACTNCNGPAHNNKLFAPVALASGPDGSVYVGDFNFVRRIFPSGNSVSILELSTSPAHKYYLAMDPVSESLYLSDTNTRKVYKLKSLVETKDLSKNFEVVAGTGDQCLPFDQSHCGDGGRASEASLNSPRGITVDRHGFIYFVDGTMIRKIDENAVITTVIGSNGLTSTQPLSCDSGMDITQVRLEWPTDLAVNPMDNSLYVLDNNIVLQISENRRVRIIAGRPIHCQVPGIDHFLVSKVAIHSTLESARAISVSHSGLLFIAETDERKVNRIQQVTTNGEIYIIAGAPTDCDCKIDPNCDCFSGDGGYAKDAKMKAPSSLAVSPDGTLYVADLGNVRIRTISRNQAHLNDMNIYEIASPADQELYQFTVNGTHLHTLNLITRDYVYNFTYNSEGDLGAITSSNGNSVHIRRDAGGMPLWLVVPGGQVYWLTISSNGVLKRVSAQGYNPALMTYPGNTGLLATKSNENGWTTVYEYDPEGHLTNATFPTGEVSSFHSDLEKLTKVELDTSNRENVLMSTNLTATSTIYILKQENTQSTYRVNPDGSLRVTFASGMEIGLSSEPHILAGAVNPTLGKCNISLPGEHNANLIEWRQRKEQNKGNVSAFERRLRAHNRNLLSIDFDHITRTGKIYDDHRKFTLRILYDQTGRPILWSPVSRYNEVNITYSPSGLVTFIQRGTWNEKMEYDQSGKIISRTWADGKIWSYTYLEKSVMLLLHSQRRYIFEYDQSDCLLSVTMPSMVRHSLQTMLSVGYYRNIYTPPDSSTSFIQDYSRDGRLLQTLHLGTGRRVLYKYTKQARLSEVLYDTTQVTLTYEESSGVIKTIHLMHDGFICTIRYRQTGPLIGRQIFRFSEEGLVNARFDYSYNNFRVTSMQAVINETPLPIDLYRYVDVSGRTEQFGKFSVINYDLNQVITTTVMKHTKIFSANGQVIEVQYEILKAIAYWMTIQYDNVGRHGNMCIRVGVDANITRYFYEYDADGQLQTVSVNDKTQWRYSYDLNGDINLLSHGKSARLTPLRYDLRDRITRLGEIQYKMDEDGFLRQRGNDIFEYNSNGLLQKAYNKASGWTVQYYYDGLGRRVASKSSLGQHLQFFVDATANPIRVTHLYNHTSSEITSLYYDLQGHLIAMELSSGEEYYVACDNTGTPLAVFSSRGQVIKEILYTPYGDIYHDTYPDFQVIIGFHGGLYDFLTKLVHLGQRDYDVVAGRWTTAYHHIWKQLNLLPKPFNLYSFENNYPVGKIQDVAKYTTDIRSWLELFGFQLHNVLPGFPKPELENLELTYELLRLQTKTQEWDPGKTILGIQCELQKQLRNFISLDQLPMTPRYNDGRCLEGGKQPRFAAVPSVFGKGIKFAIKDGIVTADIIGVANEDSRRLAAILNNAHYLENLHFTIEGRDTHYFIKLGSLEEDLVLIGNTGGRRILENGVNVTVSQMTSLLNGRTRRFADIQLQHGALCFNIRYGTTVEEEKNHVLEIARQRAVAQAWTKEQRRLQEGEEGIRAWTEGEKQQLLSTGRVQGYDGYFVLSVEQYLELSDSANNIHFMRQSEIGRR

SEQ ID NO: 231 - DNA, 4930 bp, Homo sapiens
ctcagccttcccggttcgggaaaggggaagaatgcaggaggggtaggatttctttcctgataggatcggttgggaaagaccgcagcctgtgtgtgtctttcccttcgaccaaggtgtctgttgctccgtaaataaaacgtcccactgccttctgagagcgctataaaggcagcggaagggtagtccgcggggcattccgggcggggcgcgagcagagacaggtcatggcagcgccaggcggcaggtcggagccgccgcagctccccgagtacagctgcagctacatggtgtcgcggccggtctacagcgagctcgctttccagcaacagcacgagcggcgcctgcaggagcgcaagacgctgcgggagagcctggccaagtgctgcagttgttcaagaaagagagcctttggtgtgctaaagactcttgtgcccatcttggagtggctccccaaataccgagtcaaggaatggctgcttagtgacgtcatttcgggagttagtactgggctagtggccacgctgcaagggatggcatatgccctactagctgcagttcctgtcggatatggtctctactctgcttttttccctatcctgacatactttatctttggaacatcaagacatatctcagttggaccttttccagtggtgagtttaatggtgggatctgttgttctgagcatggcccccgacgaacactttctcgtatccagcagcaatggaactgtattaaatactactatgatagacactgcagctagagatacagctagagtcctgattgccagtgccctgactctgctggttggaattatacagttgatatttggtggcttgcagattggattcatagtgaggtacttggcagatcctttggttggtggcttcacaacagctgctgccttccaagtgctggtctcacagctaaagattgtcctcaatgtttcaaccaaaaactacaatggagttctctctattatctatacgctggttgagatttttcaaaatattggtgataccaatcttgctgatttcactgctggattgctcaccattgtcgtctgtatggcagttaaggaattaaatgatcggtttagacacaaaatcccagtccctattcctatagaagtaattgtgacgataattgctactgccatttcatatggagccaacctggaaaaaaattacaatgctggcattgttaaatccatcccaagggggtttttgcctcctgaacttccacctgtgagcttgttctcggagatgctggctgcatcattttccatcgctgtggtggcttatgctattgcagtgtcagtaggaaaagtatatgccaccaagtatgattacaccatcgatgggaaccaggaattcattgcctttgggatcagcaacatcttctcaggattcttctcttgttttgtggccaccactgctctttcccgcacggccgtccaggagagcactggaggaaagacacaggttgctggcatcatctctgctgcgattgtgatgatcgccattcttgccctggggaagcttctggaacccttgcagaagtcggtcttggcagctgttgtaattgccaacctgaaagggatgtttatgcagctgtgtgacattcctcgtctgtggagacagaataagattgatgctgttatctgggtgtttacgtgtatagtgtccatcattctggggctggatctcggtttactagctggccttatatttggactgttgactgtggtcctgagagttcagtttccttcttggaatggccttggaagcatccctagcacagatatctacaaaagtaccaagaattacaaaaacattgaagaacctcaaggagtgaagattcttagattttccagtcctattttctatggcaatgtcgatggttttaaaaaatgtatcaagtccacagttggatttgatgccattagagtatataataagaggctgaaagcgctgaggaaaatacagaaactaataaaaagtggacaattaagagcaacaaagaatggcatcataagtgatgctgtttcaacaaataatgcttttgagcctgatgaggatattgaagatctggaggaacttgatatcccaaccaaggaaatagagattcaagtggattggaactctgagcttccagtcaaagtgaacgttcccaaagtgccaatccatagccttgtgcttgactgtggagctatatctttcctggacgttgttggagtgagatcactgcgggtgattgtcaaagaattccaaagaattgatgtgaatgtgtattttgcatcacttcaagattatgtgatagaaaagctggagcaatgcgggttctttgacgacaacattagaaaggacacattctttttgacggtccatgatgctatactctatctacagaaccaagtgaaatctcaagagggtcaaggttccattttagaaacgatcactctcattcaggattgtaaagatacccttgaattaatagaaacagagctgacggaagaagaacttgatgtccaggatgaggctatgcgtacacttgcatcctgaaagtgggttcgggaggtctctatgagcaaggaatacaagacaaaacttcctcaatgcattgactatttcttcagactcaaaacactcattcttttttctattaagccattgaaagagaagcactaagactgcttctaggctttatttataaaataaacaccttatccctaacatgggcaaaatggctagaattattcagacgatttggcagcgtccagggtaagctggtgttataatacgctgctgatctacatcacagatttgctaataatgttcacgtgggccctggcatatctctgttcagttagagtgagtgctgacccaacagcctctgtggtcaagcgagtcacgaatgattaatcataaagaaaaatcagtttttgactgacctggatatccatgagctgcactgatcaccatgtaaggtcacatttagtaaatgctgaaataaaatgattaatgcatttatcaataaaagcctttgaaaatactttggataataaattggagttttaaaaatgcaaatttgcttagtatctaataatgaagtgttattacatatagccggaattgaggatctctttgatcctggaaatggtttacctaaaagctacagaaccaggccaatatattttgaaatattgatgcagacaaatgaaataataaagagattttcatggtttataaaaatcttttttgatatgataataatcatgatcacaactgagatcaaaaaaatatatgacagattattttgtttaaaaatgcagttttaattatcttagtctatagaaatgatcattgcatggaggcatgtataggtatgatctgtgtaaaatctgacataaaaacagtgctattctgagtgaaaatttttttgatgtgcttacataaccatggtgattaaaatgagtttatattttttctcaaaaattttagcagtgtgtaaagtaagtaatctttaactgaactctgaccacttaaaaaaaaatctaaaaattgaactacctatagtagtctgtgtttaaagtgaatttttaaagacaaagcattctaaatgaactcaatataaaaacattcatttggaatgtacatactgaaaaatacaggtttttttgaccaaaagtttttatatcttttctttttatttatttttttcctaagtgccaacaattttctagatattatatacaacacaggctttgatcttggggacttttcccatatatttcacactggagtgaatgaagttgtacttcatttctagagaaaagttatacccaggtccccaattgagaatgtcttgcttgattgaaaacgacatcatcccttggtatactccagggattggtttcaggacccctgcatttaccaaaatttgtgcacactcaagtcctgcagtcacccctgcctaaagatagaatggcttctctgtttttcttctgaaatacaaccagaaacaatgtgtctatttctgaaagaataggattaatgatcatacaaatgggttaatcctgaattctggttgtaaatctggttacagcataactaggattataatgctgcctcattttcacagcactacttgcttatattgacaacaaatcatctcgctaaagagtgaatgtaggccaggcgcggtggctcatgcctgtaatcccagcactttgggaggccgaggcgggtggatcacgaggtcaggagatcgagaccatcctggctaacatggtaaaaccccgtctctactaaaaatagaaaaaaagaaattagcctagcgtggtggctggcgggcgcctgtagtcccagctatttgggaggctaaggcaggagaatggcgtgaacccgggaggcggagcttgcagtgagccgaggtcgtgccactgcactccagcctgggcgacagagcaagactccgtctcaaaaaaaaaaaaaaaaaaaaaaaaagagtgaatgtaatagtcttgcagaaaatgaatgaatacctttgttcaataaaggaaatatgcactgctcacttttttgaaggaaatgccaaagttacgttttacaacaaggctagagtttgtaaattctgggttcatttgtgatgacataagtcagcaaactgcgggaatactgtctcttctatgtattttgtgaatagtaagcataattttagttttgtattatcaatgaaaatttcacttgaaattaaagctgccttttgttatatttttaacctataggataagattccagtattgtatatgagttttaacaaattaaaaaatcaaatcatgtacatttgaaaatatttgcacacatttaaaaataaatgtaaagttgtcttttaaactactcggatgtgtcctttctgaacaaaa

SEQ ID NO: 232 - protein, 790 aa, Homo sapiens
MAAPGGRSEPPQLPEYSCSYMVSRPVYSELAFQQQHERRLQERKTLRESLAKCCSCSRKRAFGVLKTLVPILEWLPKYRVKEWLLSDVISGVSTGLVATLQGMAYALLAAVPVGYGLYSAFFPILTYFIFGTSRHISVGPFPVVSLMVGSVVLSMAPDEHFLVSSSNGTVLNTTMIDTAARDTARVLIASALTLLVGIIQLIFGGLQIGFIVRYLADPLVGGFTTAAAFQVLVSQLKIVLNVSTKNYNGVLSIIYTLVEIFQNIGDTNLADFTAGLLTIVVCMAVKELNDRFRHKIPVPIPIEVIVTIIATAISYGANLEKNYNAGIVKSIPRGFLPPELPPVSLFSEMLAASFSIAVVAYAIAVSVGKVYATKYDYTIDGNQEFIAFGISNIFSGFFSCFVATTALSRTAVQESTGGKTQVAGIISAAIVMIAILALGKLLEPLQKSVLAAVVIANLKGMFMQLCDIPRLWRQNKIDAVIWVFTCIVSIILGLDLGLLAGLIFGLLTVVLRVQFPSWNGLGSIPSTDIYKSTKNYKNIEEPQGVKILRFSSPIFYGNVDGFKKCIKSTVGFDAIRVYNKRLKALRKIQKLIKSGQLRATKNGIISDAVSTNNAFEPDEDIEDLEELDIPTKEIEIQVDWNSELPVKVNVPKVPIHSLVLDCGAISFLDVVGVRSLRVIVKEFQRIDVNVYFASLQDYVIEKLEQCGFFDDNIRKDTFFLTVHDAILYLQNQVKSQEGQGSILETITLIQDCKDTLELIETELTEEELDVQDEAMRTLASQDEAMRTLAS

SEQ ID NO: 233 - DNA, 1282 bp, Homo sapiens; identical to SEQ ID NO: 139

SEQ ID NO: 234 - protein, 339 aa, Homo sapiens; identical to SEQ ID NO: 32

SEQ ID NO: 235 - DNA, 1833 bp, Homo sapiens
atgattgcttcacagtttctctcagctctcactttggtgcttctcattaaagagagtggagcctggtcttacaacacctccacggaagctatgacttatgatgaggccagtgcttattgtcagcaaaggtacacacacctggttgcaattcaaaacaaagaagagattgagtacctaaactccatattgagctattcaccaagttattactggattggaatcagaaaagtcaacaatgtgtgggtctgggtaggaacccagaaacctctgacagaagaagccaagaactgggctccaggtgaacccaacaataggcaaaaagatgaggactgcgtggagatctacatcaagagagaaaaagatgtgggcatgtggaatgatgagaggtgcagcaagaagaagcttgccctatgctacacagctgcctgtaccaatacatcctgcagtggccacggtgaatgtgtagagaccatcaataattacacttgcaagtgtgaccctggcttcagtggactcaagtgtgagcaaattgtgaactgtacagccctggaatcccctgagcatggaagcctggtttgcagtcacccactgggaaacttcagctacaattcttcctgctctatcagctgtgataggggttacctgccaagcagcatggagaccatgcagtgtatgtcctctggagaatggagtgctcctattccagcctgcaatgtggttgagtgtgatgctgtgacaaatccagccaatgggttcgtggaatgtttccaaaaccctggaagcttcccatggaacacaacctgtacatttgactgtgaagaaggatttgaactaatgggagcccagagccttcagtgtacctcatctgggaattgggacaacgagaagccaacgtgtaaagctgtgacatgcagggccgtccgccagcctcagaatggctctgtgaggtgcagccattcccctgctggagagttcaccttcaaatcatcctgcaacttcacctgtgaggaaggcttcatgttgcagggaccagcccaggttgaatgcaccactcaagggcagtggacacagcaaatcccagtttgtgaagctttccagtgcacagccttgtccaaccccgagcgaggctacatgaattgtcttcctagtgcttctggcagtttccgttatgggtccagctgtgagttctcctgtgagcagggttttgtgttgaagggatccaaaaggctccaatgtggccccacaggggagtgggacaacgagaagcccacatgtgaagctgtgagatgcgatgctgtccaccagcccccgaagggtttggtgaggtgtgctcattcccctattggagaattcacctacaagtcctcttgtgccttcagctgtgaggagggatttgaattatatggatcaactcaacttgagtgcacatctcagggacaatggacagaagaggttccttcctgccaagtggtaaaatgttcaagcctggcagttccgggaaagatcaacatgagctgcagtggggagcccgtgtttggcactgtgtgcaagttcgcctgtcctgaaggatggacgctcaatggctctgcagctcggacatgtggagccacaggacactggtctggcctgctacctacctgtgaagctcccactgagtccaacattcccttggtagctggactttctgctgctggactctccctcctgacattagcaccatttctcctctggcttcggaaatgcttacggaaagcaaagaaatttgttcctgccagcagctgccaaagccttgaatcagacggaagctaccaaaagccttcttacatcctttaa

SEQ ID NO: 236 - protein, 610 aa, Homo sapiens
MIASQFLSALTLVLLIKESGAWSYNTSTEAMTYDEASAYCQQRYTHLVAIQNKEEIEYLNSILSYSPSYYWIGIRKVNNVWVWVGTQKPLTEEAKNWAPGEPNNRQKDEDCVEIYIKREKDVGMWNDERCSKKKLALCYTAACTNTSCSGHGECVETINNYTCKCDPGFSGLKCEQIVNCTALESPEHGSLVCSHPLGNFSYNSSCSISCDRGYLPSSMETMQCMSSGEWSAPIPACNVVECDAVTNPANGFVECFQNPGSFPWNTTCTFDCEEGFELMGAQSLQCTSSGNWDNEKPTCKAVTCRAVRQPQNGSVRCSHSPAGEFTFKSSCNFTCEEGFMLQGPAQVECTTQGQWTQQIPVCEAFQCTALSNPERGYMNCLPSASGSFRYGSSCEFSCEQGFVLKGSKRLQCGPTGEWDNEKPTCEAVRCDAVHQPPKGLVRCAHSPIGEFTYKSSCAFSCEEGFELYGSTQLECTSQGQWTEEVPSCQVVKCSSLAVPGKINMSCSGEPVFGTVCKFACPEGWTLNGSAARTCGATGHWSGLLPTCEAPTESNIPLVAGLSAAGLSLLTLAPFLLWLRKCLRKAKKFVPASSCQSLESDGSYQKPSYIL

SEQ ID NO: 237 - DNA, 3793 bp, Homo sapiens
atgatgtgtgaagtgatgcccacgattaatgaggacaccccaatgagccaaagggggtcccaaagcagtggctcggactcagactcccattttgagcagctgatggtgaatatgctagatgaaagggatcgtcttctagacacccttcgggagacccaggaaagcctctcacttgcccagcaaagacttcaggatgtcatctatgaccgagactcactccagagacagctcaattcagccctgccacaggatatcgaatccctaacaggagggctggctggttctaagggggctgatccaccggaatttgctgcactgacaaaagaattaaatgcctgcagggaacaacttctagaaaaggaagaagaaatctctgaacttaaagctgaaagaaacaacacaagactattactggagcatttggagtgccttgtgtcacgacatgaaagatcactaagaatgacggtggtaaaacggcaagcccagtctccctcaggagtatccagtgaagttgaagttctcaaggcactgaaatctttgtttgagcaccacaaggccttggatgaaaaggtaagggagcgactgagggtttctttagaaagagtctctgcactggaagaagaactagctgctgctaatcaggagattgttgccttgcgtgaacaaaatgttcatatacaaagaaaaatggcatcaagcgagggatccacagagtcagaacatcttgaagggatggaacctggacagaaagtccatgagaagcgtttgtccaatggttctatagactcaaccgatgaaactagtcaaatagttgaactacaagaattgcttgaaaagcaaaactatgaaatggcccagatgaaagaacgtttagcagccctttcttcccgagtgggagaggtggaacaggaagcagagacagcaagaaaggatctcattaaaacagaagaaatgaacaccaagtatcaaagggacattagggaggccatggcacaaaaggaagatatggaagaaagaattacaacccttgaaaagcgttacctcagtgctcagagagaatctacctccatacatgacatgaatgataaactagaaaatgagttagcaaataaagaagctatcctacggcagatggaagagaaaaacagacagttacaagaacgtcttgagctagctgaacaaaagttgcagcagaccatgagaaaggctgaaaccttgcctgaagtagaggctgaactggctcagagaattgcagccctaaccaaggctgaagagagacatggaaatattgaagaacgtatgagacatttagagggtcaacttgaagagaagaatcaagaacttcaaagagctaggcaaagagagaaaatgaatgaggagcataacaagagattatcggatacggttgatagacttctgactgaatccaatgaacgcctacaactacacttaaaggaaagaatggctgctctagaagaaaagaatgttttaattcaagaatcagaaactttcagaaagaatcttgaagaatctttacatgataaggaaagattagcagaagaaattgaaaagctgagatctgaacttgaccaattgaaaatgagaactggctctttaattgaacccacaataccaagaactcatctagacacctcagctgagttgcggtactcagtgggatccctagtggacagccagtctgattacagaacaactaaagtaataagaagaccaaggagaggccgcatgggtgtgcgaagagatgagccaaaggtgaaatctcttggggatcacgagtggaatagaactcaacagattggagtactaagcagccacccttttgaaagtgacactgaaatgtctgatattgatgatgatgacagagaaacaatttttagctcaatggatcttctctctccaagtggtcattccgatgcccagacgctagccatgatgcttcaggaacaattggatgccatcaacaaagaaatcaggctaattcaggaagaaaaagaatctacagagttgcgtgctgaagaaattgaaaatagagtggctagtgtgagcctcgaaggcctgaatttggcaagggtccacccaggtacctccattactgcctctgttacagcttcatcgctggccagttcatctccccccagtggacactcaactccaaagctcacccctcgaagccctgccagggaaatggatcggatgggagtcatgacactgccaagtgatctgaggaaacatcggagaaagattgcagttgtggaagaagatggtcgagaggacaaagcaacaattaaatgtgaaacttctcctcctcctacccctagagccctcagaatgactcacactctcccttcttcctaccacaatgatgctcgaagtagtttatctgtctctcttgagccagaaagcctcgggcttggtagtgccaacagcagccaagactctcttcacaaagcccccaagaagaaaggaatcaagtcttcaataggacgtttgtttggtaaaaaagaaaaagctcgacttgggcagctccgaggctttatggagactgaagctgcagctcaggagtccctggggttaggcaaactcggaactcaagctgagaaggatcgaagactaaagaaaaagcatgaacttcttgaagaagctcggagaaagggattaccttttgcccagtgggatgggccaactgtggtcgcatggctagagctttggttgggaatgcctgcgtggtacgtggcagcctgccgagccaacgtgaagagtggtgccatcatgtctgctttatctgacactgagatccagagagaaattggaatcagcaatccactgcatcgcttaaaacttcgattagcaatccaggagatggtttccctaacaagtccttcagctcctccaacatctcgaactccttcaggcaacgtttgggtgactcatgaagaaatggaaaatcttgcagctccagcaaaaacgaaagaatctgaggaaggaagctgggcccagtgtccggtttttctacagaccctggcttatggagatatgaatcatgagtggattggaaatgaatggcttcccagcttggggttacctcagtacagaagttactttatggaatgcttggtagatgcaagaatgttagatcacctaacaaaaaaagatctccgtgtccatttaaaaatggtggatagtttccatcgaacaagtttacaatatggaattatgtgcttaaagaggttgaattatgacagaaaagaactagaaagaagacgggaagcaagccaacatgaaataaaagacgtgttggtgtggagcaatgaccgaattattcgctggatacaagcaattggacttcgagaatatgcaaataatatacttgagagcggtgtgcatggctcacttatagccctggatgaaaactttgactacagcagcttaactttattattacagattccaacacagaacacccaggcaaggcagattcttgaaagagaatacaataacctcttggccctgggaactgaaaggcgactggatgaaagtgatgacaagaacttcagacgtggatcaacctggagaaggcagtttcctcctcgtgaagtacatggaatcagcatgatgcctgggtcctcagaaacattaccagctggatttaggttaaccacaacctctgggcaatcaagaaaaatgacaacagatgttgcttcatcaagactgcagaggttagacaactccactgttcgcacatactcatgtctcgagtaagcggccgctttaa

SEQ ID NO: 238 - protein, 1259 aa, Homo sapiens
MMCEVMPTINEDTPMSQRGSQSSGSDSDSHFEQLMVNMLDERDRLLDTLRETQESLSLAQQRLQDVIYDRDSLQRQLNSALPQDIESLTGGLAGSKGADPPEFAALTKELNACREQLLEKEEEISELKAERNNTRLLLEHLECLVSRHERSLRMTVVKRQAQSPSGVSSEVEVLKALKSLFEHHKALDEKVRERLRVSLERVSALEEELAAANQEIVALREQNVHIQRKMASSEGSTESEHLEGMEPGQKVHEKRLSNGSIDSTDETSQIVELQELLEKQNYEMAQMKERLAALSSRVGEVEQEAETARKDLIKTEEMNTKYQRDIREAMAQKEDMEERITTLEKRYLSAQRESTSIHDMNDKLENELANKEAILRQMEEKNRQLQERLELAEQKLQQTMRKAETLPEVEAELAQRIAALTKAEERHGNIEERMRHLEGQLEEKNQELQRARQREKMNEEHNKRLSDTVDRLLTESNERLQLHLKERMAALEEKNVLIQESETFRKNLEESLHDKERLAEEIEKLRSELDQLKMRTGSLIEPTIPRTHLDTSAELRYSVGSLVDSQSDYRTTKVIRRPRRGRMGVRRDEPKVKSLGDHEWNRTQQIGVLSSHPFESDTEMSDIDDDDRETIFSSMDLLSPSGHSDAQTLAMMLQEQLDAINKEIRLIQEEKESTELRAEEIENRVASVSLEGLNLARVHPGTSITASVTASSLASSSPPSGHSTPKLTPRSPAREMDRMGVMTLPSDLRKHRRKIAVVEEDGREDKATIKCETSPPPTPRALRMTHTLPSSYHNDARSSLSVSLEPESLGLGSANSSQDSLHKAPKKKGIKSSIGRLFGKKEKARLGQLRGFMETEAAAQESLGLGKLGTQAEKDRRLKKKHELLEEARRKGLPFAQWDGPTVVAWLELWLGMPAWYVAACRANVKSGAIMSALSDTEIQREIGISNPLHRLKLRLAIQEMVSLTSPSAPPTSRTPSGNVWVTHEEMENLAAPAKTKESEEGSWAQCPVFLQTLAYGDMNHEWIGNEWLPSLGLPQYRSYFMECLVDARMLDHLTKKDLRVHLKMVDSFHRTSLQYGIMCLKRLNYDRKELERRREASQHEIKDVLVWSNDRIIRWIQAIGLREYANNILESGVHGSLIALDENFDYSSLTLLLQIPTQNTQARQILEREYNNLLALGTERRLDESDDKNFRRGSTWRRQFPPREVHGISMMPGSSETLPAGFRLTTTSGQSRKMTTDVASSRLQRLDNSTVRTYSCLE

SEQ ID NO: 239 - DNA, 1134 bp, Homo sapiens; identical to SEQ ID NO: 221

SEQ ID NO: 240 - protein, 377 aa, Homo sapiens; identical to SEQ ID NO: 222

SEQ ID NO: 241 - DNA, 4298 bp, Homo sapiens
aattcgcccttgcttaattaagcatgtttaccttcctgtcatctgtcactgctgctgtcagtggcctcctggtgggttatgaacttgggatcatctctggggctcttcttcagatcaaaaccttattagccctgagctgccatgagcaggaaatggttgtgagctccctcgtcattggagccctccttgcctcactcaccggaggggtcctgatagacagatatggaagaaggacagcaatcatcttgtcatcctgcctgcttggactcggaagcttagtcttgatcctcagtttatcctacacggttcttatagtgggacgcattgccataggggtttccatctccctctcttccattgccacttgtgtttacatcgcagagattgctcctcaacacagaagaggccttcttgtgtcactgaatgagctgatgattgtcatcggcattctttctgcctatatttcaaattacgcatttgccaatgttttccatggctggaagtacatgtttggtcttgtgattcccttgggagttttgcaagcaattgcaatgtattttcttcctccaagccctcggtttctggtgatgaaaggacaagagggagctgctagcaaggttcttggaaggttaagagcactctcagatacaactgaggaactcactgtgatcaaatcctccctgaaagatgaatatcagtacagtttttgggatctgtttcgttcaaaagacaacatgcggacccgaataatgataggactaacactagtattttttgtacaaatcactggccaaccaaacatattgttctatgcatcaactgttttgaagtcagttggatttcaaagcaatgaggcagctagcctcgcctccactggggttggagtcgtcaaggtcattagcaccatccctgccactcttcttgtagaccatgtcggcagcaaaacattcctctgcattggctcctctgtgatggcagcttcgttggtgaccatgggcatcgtaaatctcaacatccacatgaacttcacccatatctgcagaagccacaattctatcaaccagtccttggatgagtctgtgatttatggaccaggaaacctgtcaaccaacaacaatactctcagagaccacttcaaagggatttcttcccatagcagaagctcactcatgcccctgagaaatgatgtggataagagaggggagacgacctcagcatccttgctaaatgctggattaagccacactgaataccagatagtcacagaccctggggacgtcccagcttttttgaaatggctgtccttagccagcttgcttgtttatgttgctgctttttcaattggtctaggaccaatgccctggctggtgctcagcgagatctttcctggtgggatcagaggacgagccatggctttaacttctagcatgaactggggcatcaatctcctcatctcgctgacatttttgactgtaactgatcttattggcctgccatgggtgtgctttatatatacaatcatgagtctagatcttattggcctgccatgggtgtgctttatatatacaatcatgagtctagcatccctgctttttgttgttatgtttatacctgagacaaagggatgctctttggaacaaatatcaatggagctagcaaaagtgaactatgtgaaaaacaacatttgttttatgagtcatcaccaagaagaattagtgccaaaacagcctcaaaaaagaaaaccccaggagcagctcttggagtgtaacaagctgtgtggtaggggccaatccaggcagctttctccagagacctaatggcctcaacaccttctgaacgtggatagtgccagaacacttaggagggtgtctttggaccaatgcatagttgcgactcctgtgctctcttttcagtgtcatggaactggttttgaagagacactctgaaatgataaagacagcctttaatccccctcctcmccagaaggaacctcaaaaggtagatgaggtacaaggtcctaagtgatctctttttctgagcaggatatcaggttaaaaaaaaaaagttactggctggtttaatactttctaccttcttcacagagcagcctttgaatagactatgtcctagtgaagacatcaacctccgccttaagctatgtatgtatggaggccagtcgcagctttattatgcagacacacaagtggtctggacatgagggtacagtttctgcctaccaagacactacttgcactggatcttacgcaaaaaagaaccagaacacacagtgtggacaactgcccatatattctatctagattaggagagggtcctggctaggattttagtggtaattcctagttacattcaacaagtataaagattatagagcttattttatgaactataaactataatttaatgcaaaatatccttttatgaatttcatgttaatattgtgaaatattaaaataattccrcaatagttgagaaaaatgagcatttttttccatttttaaaaaatgcatagaaaagacaattttaaaatcctgggaccatatttatttagaagtagctgttagtaaaacattagaaaaggagtcaggccattaggttatttatccaaatctctaagcaattaggttgaagttattaagtcaagcctagaaaagctgcctccttgtaaggctttcatgacaatgtatagtaatccacagtgtccaattcttcacactcctcaggaatatcactacctcaggttacggtacacaggctataattgatgatgatgttcagataactgaagacacaataaatgacattcagacatcaggamaawwccctcatgttcttttctatgatggccacctgtaccagcaacgtgggtttcacccacacaacgatgaactgttctcttacttctccagttgattttaaagacttgttaagaggtcttactaataaaatttgggtatgatagaaaawccacaatcaaawcttgaaccaaataacatattaaattactaatatttaagtgatggaagacacacaaaaaacttaaaagcacgaacaacctaacttgaaaaagaattttaaaatatgattaacctgaagaaaagagaatcctaagagccaaagctcctttttatttagcttggaattttcctattggttcctaacaaactgtcccaatgtcatataaggaaacatgatctattacattcctttataacaatgtggagagactataaacctatgtaagtagtaaaactatatyagagactcaggagactgactaaaaggcctggatctgcagtgtattatctgtataaaaattggcagggggaagctaaaaggaaaggagattggagatctcaattctatcatggtgtatttcatacgcaaatcagagcatgcattgttttttgtttttggaaagagaagggaagtgtgttctgccccatgtttccttccgtgtttatagttcaaactctatatatacttcaggtattttttgtttagcccttcattataaatgggcaggaaattgtttatcaacctagccagtttattactagtgaccttgacttcagtatcttgagcattcttttatatttttcttttattatcctgagtctgtaactaaacaattttgtcttcaaatttttatccaatatccattgcaccacaccaaatcaagcttcttgattttcaaaaataaaaagggggaaatacttacaacttgtacatatatattcacagtttttatttataaaaaaaatttacagtacttatggagagccagcagaagacatcagagcactcacttcttcccatctttgttaaggttagcgaattacccatggacactgttaggtgaggctcattcggcagccctgaaaacaaacctggtcacactgtctttaccctctcccttcagataaagcacttcgattatctattgatctgcccagttttcaagtcatgcgaatactaaaaaggttacatcatctggatctgtaccttggctatataagcatgttttccccctattctatgtttctttttttggtgaacattgaaaaacaggaggtgacttattactgttaattaaaactaaatgaaaaatgtcaagtctttaaaacagtgagcttgtaactctttcatgtaattttattctctatgaatttggctatcctactgaatcttaaaataaaggaaataaacacttttttttwaaaaaaaaggaaaaatamaarwmwaaaaatctcaatgaaatatttcacaagaaggaaaaa

SEQ ID NO: 242 - protein, 597 aa, Homo sapiens
MFTFLSSVTAAVSGLLVGYELGIISGALLQIKTLLALSCHEQEMVVSSLVIGALLASLTGGVLIDRYGRRTAIILSSCLLGLGSLVLILSLSYTVLIVGRIAIGVSISLSSIATCVYIAEIAPQHRRGLLVSLNELMIVIGILSAYISNYAFANVFHGWKYMFGLVIPLGVLQAIAMYFLPPSPRFLVMKGQEGAASKVLGRLRALSDTTEELTVIKSSLKDEYQYSFWDLFRSKDNMRTRIMIGLTLVFFVQITGQPNILFYASTVLKSVGFQSNEAASLASTGVGVVKVISTIPATLLVDHVGSKTFLCIGSSVMAASLVTMGIVNLNIHMNFTHICRSHNSINQSLDESVIYGPGNLSTNNNTLRDHFKGISSHSRSSLMPLRNDVDKRGETTSASLLNAGLSHTEYQIVTDPGDVPAFLKWLSLASLLVYVAAFSIGLGPMPWLVLSEIFPGGIRGRAMALTSSMNWGINLLISLTFLTVTDLIGLPWVCFIYTIMSLDLIGLPWVCFIYTIMSLASLLFVVMFIPETKGCSLEQISMELAKVNYVKNNICFMSHHQEELVPKQPQKRKPQEQLLECNKLCGRGQSRQLSPET

SEQ ID NO: 243 - DNA, 979 bp, Homo sapiens
  modified_base (17)..(17): a, c, g, t, unknown or other
  modified_base (229)..(230): a, c, g, t, unknown or other
  modified_base (238)..(238): a, c, g, t, unknown or other
tttagccaccagagganttctcttgaaatacccaaaatccatcagtatcttgaatcatgctggattttgaagaattcttaagaagccatgtaaagggggctctctggccttgaaatagtgatgttttttatacagaaaggagaatgcagaatggtcagactatcatgcactgttaaatttgatttcaagaaattacaggaaaactttccaaagttccatctcacagaannttattttnccaagaattccaagataagtttagttttatggaagacttttatgtggtttttactcactcttcatctcagacatcgacagatgattacatcacttatagttctagtaaatttattaatataaaactcagagacattccaatatccacattgcttacaccattaggcatagattcagtgtcagctatgacaattgaaaatgagctgttttgtgatttaaaggtttaaatttctctaaccaaactgcttgatccagatgcaggactgcaaatgttaatatttgttctggaagaacaatcaaataagacttaagaggaaagggaatggccacaatccacctgaaattttttcttaaaaagtgtgcagcctactaaatcagaatgaaaatagaagtacaagattataaacaaaatgcaatcaaacttttcttaagcttacctaaagttatttcatctgaaaatttcaagcaactttgttcaacattaaattgacaatctaaactaacaagtcttttgaatttatgcatggtagtaaacattctctctattaactttattacctaaggctaaacctaaaatttttaagcaaaattagaaaaatagtcttcactcatcaaaaaataaagtttgttacatttagtattttcccaataaaattggtcgttcttggttttttatttggagagtctgtgcaaaatgtcactaaaaataaattagcactagaaattatttctaaataccaaa

SEQ ID NO: 244 - DNA, 2443 bp, Homo sapiens
aaatggcgtgcccgtctctccgccggccccctgcctcgcagtggtttctcctgcagctcccctgggctccgcggccagtagtgcagcccgtggagccgcggctttgcccgtctcctctgggtggccccagtgcgcgggctgacactcattcagccggggaaggtgaggcgagtagaggctggtgcggaacttgccgcccccagcagcgccggcgggctaagcccagggccgggcagacaaaagaggccgcccgcgtaggaaggcacggccggcggcggcggagcgcagcgatggccgggcgagggggcagcgcgctgctggctctgtgcggggcactggctgcctgcgggtggctcctgggcgccgaagcccaggagcccggggcgcccgcggcgggcatgaggcggcgccggcggctgcagcaagaggacggcatctccttcgagtaccaccgctaccccgagctgcgcgaggcgctcgtgtccgtgtggctgcagtgcaccgccatcagcaggatttacacggtggggcgcagcttcgagggccgggagctcctggtcatcgagctgtccgacaaccctggcgtccatgagcctggtgagcctgaatttaaatacattgggaatatgcatgggaatgaggctgttggacgagaactgctcattttcttggcccagtacctatgcaacgaataccagaaggggaacgagacaattgtcaacctgatccacagtacccgcattcacatcatgccttccctgaacccagatggctttgagaaggcagcgtctcagcctggtgaactcaaggactggtttgtgggtcgaagcaatgcccagggaatagatctgaaccggaactttccagacctggataggatagtgtacgtgaatgagaaagaaggtggtccaaataatcatctgttgaaaaatatgaagaaaattgtggatcaaaacacaaagcttgctcctgagaccaaggctgtcattcattggattatggatattccttttgtgctttctgccaatctccatggaggagaccttgtggccaattatccatatgatgagacgcggagtggtagtgctcacgaatacagctcctccccagatgacgccattttccaaagcttggcccgggcatactcttctttcaacccggccatgtctgaccccaatcggccaccatgtcgcaagaatgatgatgacagcagctttgtagatggaaccaccaacggtggtgcttggtacagcgtacctggagggatgcaagacttcaattaccttagcagcaactgttttgagatcaccgtggagcttagctgtgagaagttcccacctgaagagactctgaagacctactgggaggataacaaaaactccctcattagctaccttgagcagatacaccgaggagttaaaggatttgtccgagaccttcaaggtaacccaattgcgaatgccaccatctccgtggaaggaatagaccacgatgttacatccgcaaaggatggtgattactggagattgcttatacctggaaactataaacttacagcctcagctccaggctatctggcaataacaaagaaagtggcagttccttacagccctgctgctggggttgattttgaactggagtcattttctgaaaggaaagaagaggagaaggaagaattgatggaatggtggaaaatgatgtcagaaactttaaatttttaaaaaggcttctagttagctgctttaaatctatctatataatgtagtatgatgtaatgtggtcttttttttagattttgtgcagttaatacttaacattgatttattttttaatcatttaaatattaatcaactttccttaaaataaatagcctcttaggtaaaaatataagaacttgatatatttcattctcttatatagtattcattttcctacctatattacacaaaaaagtatagaaaagatttaagtaattttgccatcctaggcttaaatgcaatattcctggtattatttacaatgcagaattttttgagtaattctagctttcaaaaattagtgaagttcttttactgtaattggtgacaatgtcacataatgaatgctattgaaaaggttaacagatacagctcggagttgtgagcactctactgcaagacttaaatagttcagtataaattgtcgtttttttcttgtgctgactaactataagcatgatcttgttaatgcatttttgatgggaagaaaaggtacatgtttacaaagaggttttatgaaaagaataaaaattgacttcttgcttgtacatataggagcaatactattatattatgtagtccgttaacactacttaaaagtttagggttttctcttggttgtagagtggcccagaattgcattctgaatgaataaaggttaaaaaaaaatccccagtgaaaaaaaa

SEQ ID NO: 245 - protein, 476 aa, Homo sapiens
MAGRGGSALLALCGALAACGWLLGAEAQEPGAPAAGMRRRRRLQQEDGISFEYHRYPELREALVSVWLQCTAISRIYTVGRSFEGRELLVIELSDNPGVHEPGEPEFKYIGNMHGNEAVGRELLIFLAQYLCNEYQKGNETIVNLIHSTRIHIMPSLNPDGFEKAASQPGELKDWFVGRSNAQGIDLNRNFPDLDRIVYVNEKEGGPNNHLLKNMKKIVDQNTKLAPETKAVIHWIMDIPFVLSANLHGGDLVANYPYDETRSGSAHEYSSSPDDAIFQSLARAYSSFNPAMSDPNRPPCRKNDDDSSFVDGTTNGGAWYSVPGGMQDFNYLSSNCFEITVELSCEKFPPEETLKTYWEDNKNSLISYLEQIHRGVKGFVRDLQGNPIANATISVEGIDHDVTSAKDGDYWRLLIPGNYKLTASAPGYLAITKKVAVPYSPAAGVDFELESFSERKEEEKEELMEWWKMMSETLNF

SEQ ID NO: 246 - DNA, 1926 bp, Homo sapiens
ggggcgacgtgagcgcgcaggggggcggcggcctcgcctcgtctctctctctgcgcctgggtcgggtgggtgacgccgagagccagagagatgtcggatttcgacagtaacccgtttgccgacccggatctcaacaatcccttcaaggatccatcagttacacaagtgacaagaaatgttccaccaggacttgatgaatataatccattctcggattctagaacacctccaccaggcggtgtgaagatgcctaatgtacccaatacacaaccagcaataatgaaaccaacagaggaacatccagcttatacacagattgcaaaggaacatgcattggcccaagctgaacttcttaagcgccaagaagaactagaaagaaaagccgcagaattagatcgtcgggaacgagaaatgcaaaacctcagtcaacatggtagaaaaaatatttggccacctcttcctagcaattttcctgtcggaccttgtttctatcaggaattttctgtagacattcctgtagaattccaaaagacagtaaagcttatgtactacttgtggatgttccatgcagtaacactgtttctaaatatcttcggatgcttggcttggttttgtgttgattctgcaagagcggttgattttggattgagtatcctgtggttcttgctttttactccttgttcatttgtctgttggtacagaccactttatggagctttcaggagtgacagttcatttagattctttgtattcttcttcgtctatatttgtcagtttgctgtacatgtactccaagctgcaggatttcataactggggcaattgtggttggatttcatcccttactggtctcaaccaaaatattcctgttggaatcatgatgataatcatagcagcacttttcacagcatcagcagtcatctcactagttatgttcaaaaaagtacatggactatatcgcacaacaggtgctagttttgagaaggcccaacaggagtttgcaacaggtgtgatgtccaacaaaactgtccagaccgcagctgcaaatgcagcttcaactgcagcatctagtgcagctcagaatgctttcaagggtaaccagatttaagaatcttcaaacaatacactgttaccttttgactgtacctttttctccagttactgtattctacaaatatttttatgttcaaaacacacagtacagacagcatggatatttcctgttcacttgtgcatgggctaaaaccaggaaaacttccttgtcttattactttacctaatagtttcttaatatttcagtgccccttgcagaaaaaatattacatgctaaataaatattctccatatttttgggggatgacattcagtgaattatttcagtggtgacccactgaaaattaataatggtacttatgattaaaaacgcatttaatactaactgcagtagttctttcaagaatctttagagataaggattgcacattggaaaagtaaaccatgtttcattcctttttccctatttatattgaaagaaataggccagcagagacttagggattttaaattggcttgctttttagctgtttcagtcaccagtgaagagcctatgtgcattttgtagtagataatgtaaaatttgtcatctttttcttttcttttttttagaatagctgatattttgataacaatctctaatttgcatgggcaccacatttcttatattaaaagaattagtgttttggcttctgtactgcttatggttgtaggattcaggggttaatggaatcacagaaatgatattctgcaagaatttcttttaaataaaaagtttgggggtgcaatataagaagtttatataatatgcagtacattatccaaaagagaaggtagttaatgcagtagaaagtagtggtaataattccttttt

SEQ ID NO: 247 - protein, 338 aa, Homo sapiens [sequence omitted]

SEQ ID NO: 248 - DNA, 615 bp, Homo sapiens
atgagagacaataaatcgtgtgcttttttcatgggaaagttaaatgtttgttttgaaggcacagtaatagcaggctattcagtgtttgccactacctgcatcattcatctggctgtagctagtgcactacaatttcctaaaaagtcttctcaccctcacaggactgctctacatctggcctctgccaatggaaattcagaagtagtaaaactcctgctggacagacgatgtcaacttaatatccttgacaacaaaaagaggacagctctgacaaaggccgtacaatgccaggaagatgaatgtgcgttaatgttgctggaacatggcactgatccgaatattccagatgagtatggaaataccgctctacactatgctatctacaatgaagataaattaatggccaaagcactgctcttatacggtgctgatatcgaatcaaaaaacaagcatggcctcacaccactgttacttggtgtacatgagcaaaaacagcaagtggtgaaatttttaatcaagaaaaaagcaaatttaaatgcactggatagatatggaaggtgtgtgaccttgggaacgttatttaccaccaaatatgttgtcatatatgaaaagtag

SEQ ID NO: 249 - protein, 204 aa, Homo sapiens
MRDNKSCAFFMGKLNVCFEGTVIAGYSVFATTCIIHLAVASALQFPKKSSHPHRTALHLASANGNSEVVKLLLDRRCQLNILDNKKRTALTKAVQCQEDECALMLLEHGTDPNIPDEYGNTALHYAIYNEDKLMAKALLLYGADIESKNKHGLTPLLLGVHEQKQQVVKFLIKKKANLNALDRYGRCVTLGTLFTTKYVVIYEK

SEQ ID NO: 250 - DNA, 3342 bp, Homo sapiens
atggtgatcatctatctttctttctgcaattattacatggagttctacagagaagagcttccccacattgactatttgattgacattcagtttgcaacaggaaaggttactcagccgggagaggacacttcctaccatcaatgcgctcagcttgaagccagagacgaaggcaccgacagtttattattaaacaatggcagcagcgccacgctgaagacacgaacgcgctgttatggaacccccagaggtctcccccatcgtagcctgctccagccgactccgcccacatgtaaaacgaagatcaggagcagatttgaagaattacaaagtgaattggtgccagtcagcatgtcagagacagaccacatagcctctacttcctctgataaaaatgttgggaaaacacctgaattaaaggaagactcatgcaacttgttttctggcaatgaaagcagcaaattagaaaatgagtccaaactattgtcattaaacactgataaaactttatgtcaacctaatgagcataataatcgaattgaagcccaggaaaattatattccagatcatggtggaggtgaggattcttgtgccaaaacagacacaggctcagaaaattctgaacaaatagctaattttcctagtggaaattttgctaaacatatttcaaaaacaaatgaaacagaacagaaagtaacacaaatattggtggaattaaggtcatctacatttccagaatcagctaatgaaaagacttattcagaaagcccctatgatacagactgcaccaagaaatttatttcaaaaataaagagcgtttcagcatcagaggatttgttggaagaaatagaatctgagctcttatctacggagtttgcagaacatcgagtaccaaatggaatgaataagggagaacatgcattagttctgtttgaaaagtgtgtgcaagataaatatttgcagcaggaacatatcataaaaaagttaattaaagaaaataagaagcatcaggagctcttcgtagacatttgttcagaaaaagacaatttaagagaagaactaaagaaaagaacagaaactgagaagcagcatatgaacacaattaaacagttagaatcaagaatagaagaacttaataaagaagttaaagcttccagagatcaactaatagctcaagacgttacagctaaaaatgcagttcagcagttacacaaagagatggcccaacggatggaacaggccaacaagaaatgtgaagaggcacgccaagaaaaagaagcaatggtaatgaaatatgtaagaggtgagaaggaatctttagatcttcgaaaggaaaaagagacacttgagaaaaaacttagagatgcaaataaggaacttgagaaaaacactaacaaaattaagcagctttctcaggagaaaggacggttgcaccagctgtatgaaactaaggaaggcgaaacgactagactcatcagagaaatagacaaattaaaggaagacattaactctcacgtcatcaaagtaaagtgggcacaaaacaaattaaaagctgaaatggattcacacaaggaaaccaaagataaactcaaagaaacaacaacaaaattaacacaagcaaaggaagaagcagatcagatacgaaaaaactgtcaggatatgataaaaacatatcaggagtcagaagaaattaaatcaaatgagcttgatgcaaagcttagagtcacaaaaggagaacttgaaaaacaaatgcaagaaaaatctgaccagctagagatgcatcatgccaaaataaaggaactagaagatctgaagagaacatttaaggagggtatggatgagttaagaacactgagaacaaaggtgaaatgtctagaagatgaacgattaagaacagaagatgaattatcaaaatataaggaaattattaatcgccaaaaagctgaaattcagaatttattggacaaggtgaaaactgcagatcagctacaggagcagcttcaaagaggtaagcaagaaattgaaaatttgaaagaagaagtggaaagtcttaattctttgattaatgacctacaaaaagacatcgaaggcagtaggaaaagagaatctgagctgctgctgtttacagaaaggctcactagtaagaatgcacagcttcagtctgaatccaattctttgcagtcacaatttgataaagtttcctgtagtgaaagtcagttacaaagccagtgtgaacaaatgaaacagacaaatattaatttggaaagtaggttgttgaaagaggaagaactgcgaaaagaggaagtccaaactctgcaagctgaactcgcttgtagacaaacagaagttaaagcattgagtacccaggtagaagaattaaaagatgagttagtaactcagagacgtaaacatgcctctagtatcaaggatctcaccaaacaacttcagcaagcacgaagaaaattagatcaggttgagagtggaagctatgacaaagaagtcagcagcatgggaagtcgttctagttcatcagggtccctgaatgctcgaagcagtgcagaagatcgatctccagaaaatactgggtcctcagtagctgtggataactttccacaagtagataaggccatgttgattgagagaatagttaggctgcaaaaagcacatgcccggaaaaatgaaaagatagaatttatggaggaccacatcaaacaactggtggaagaaattaggaaaaaaacaaaaataattcaaagttatattttacgagaagaatcaggcacactttcttcagaggcatctgattttaacaaagttcatttaagtagacggggtggcatcatggcatctttatatacatcccatccagctgacaatggattaacattggagctctctttggaaatcaaccgaaaattacaggctgttttggaggatacgttactaaaaaatattactttgaaggaaaatctacaaacacttggaacagaaatagaacgtcttattaaacaccagcatgaactagaacagaggacaaagaaaacctaaaacaagcctcttgctcagtaaagagacaaaagccacacaggagtaggtgccactgacctctattgttggagactttgttccactttttgtttcagccagtaaaaatattgttttgcttcatctgtacacaaaaaaatacccttttacaatatgaatgcattgctgtatatactgtaagactgaaagctttgatgaaatttgtttttgtatggtgcaatatgacagcctgtcattgaatctaaacaacttaatttgcttgtattcataagaagtgttgaacattacaagggcttttat

SEQ ID NO: 251 - protein, 1014 aa, Homo sapiens
MVIIYLSFCNYYMEFYREELPHIDYLIDIQFATGKVTQPGEDTSYHQCAQLEARDEGTDSLLLNNGSSATLKTRTRCYGTPRGLPHRSLLQPTPPTCKTKIRSRFEELQSELVPVSMSETDHIASTSSDKNVGKTPELKEDSCNLFSGNESSKLENESKLLSLNTDKTLCQPNEHNNRIEAQENYIPDHGGGEDSCAKTDTGSENSEQIANFPSGNFAKHISKTNETEQKVTQILVELRSSTFPESANEKTYSESPYDTDCTKKFISKIKSVSASEDLLEEIESELLSTEFAEHRVPNGMNKGEHALVLFEKCVQDKYLQQEHIIKKLIKENKKHQELFVDICSEKDNLREELKKRTETEKQHMNTIKQLESRIEELNKEVKASRDQLIAQDVTAKNAVQQLHKEMAQRMEQANKKCEEARQEKEAMVMKYVRGEKESLDLRKEKETLEKKLRDANKELEKNTNKIKQLSQEKGRLHQLYETKEGETTRLIREIDKLKEDINSHVIKVKWAQNKLKAEMDSHKETKDKLKETTTKLTQAKEEADQIRKNCQDMIKTYQESEEIKSNELDAKLRVTKGELEKQMQEKSDQLEMHHAKIKELEDLKRTFKEGMDELRTLRTKVKCLEDERLRTEDELSKYKEIINRQKAEIQNLLDKVKTADQLQEQLQRGKQEIENLKEEVESLNSLINDLQKDIEGSRKRESELLLFTERLTSKNAQLQSESNSLQSQFDKVSCSESQLQSQCEQMKQTNINLESRLLKEEELRKEEVQTLQAELACRQTEVKALSTQVEELKDELVTQRRKHASSIKDLTKQLQQARRKLDQVESGSYDKEVSSMGSRSSSSGSLNARSSAEDRSPENTGSSVAVDNFPQVDKAMLIERIVRLQKAHARKNEKIEFMEDHIKQLVEEIRKKTKIIQSYILREESGTLSSEASDFNKVHLSRRGGIMASLYTSHPADNGLTLELSLEINRKLQAVLEDTLLKNITLKENLQTLGTEIERLIKHQHELEQRTKKT

SEQ ID NO: 252 - DNA, 1491 bp, Homo sapiens
ttgccgtgaagggctgtgcggttcccgtgcgcgccggagcctgctgtggcctcttatgcactccaccacccccatcagctccctcttctccttcaccagccccgcagtgaagagactgctaggctggaagcaaggagatgaagaggaaaagtgggcagagaaggcagtggactctctagtgaagaagttaaagaagaagaagggagccatggacgagctggagagggctctcagctgcccggggcagcccagcaaatgcgtcacgattccccgctccctggacgggcggctgcaggtgtcccaccgcaagggcctgccccatgtgatttactgtcgcgtgtggcgctggccggatctgcagtcccaccacgagctgaagccgctggagtgctgtgagttcccatttggctccaagcagaaagaagtgtgcattaacccttaccactaccgccgggtggagactccagtactgcctcctgtgctcgtgccaagacacagtgaatataacccccagctcagcctcctggccaagttccgcagcgcctccctgcacagtgagccactcatgccacacaacgccacctatcctgactctttccagcagcctccgtgctctgcactccctccctcacccagccacgcgttctcccagtccccgtgcacggccagctaccctcactccccaggaagtccttctgagccagagagtccctatcaacactcagttgacacaccacccctgccttatcatgccacagaagcctctgagacccagagtggccaacctgtagatgccacagctgatagacatgtagtgctatcgataccaaatggagactttcgaccagtttgttacgaggagccccagcactggtgctcggtcgcctactatgaactgaacaaccgagttggggagacattccaggcttcctcccgaagtgtgctcatagatgggttcaccgacccttcaaataacaggaacagattctgtcttggacttctttctaatgtaaacagaaactcaacgatagaaaataccaggagacatataggaaagggtgtgcacttgtactacgtcgggggagaggtgtatgccgagtgcgtgagtgacagcagcatctttgtgcagagccggaactgcaactatcaacacggcttccacccagctaccgtctgcaagatccccagcggctgcagcctcaaggtcttcaacaaccagctcttcgctcagctcctggcccagtcagttcaccacggctttgaagtcgtgtatgaactgaccaagatgtgtactatccggatgagttttgttaagggttggggtgctgagtatcatcgccaggatgtcaccagcaccccctgctggattgagattcatcttcatgggccactgcagtggctggacaaagttctgactcagatgggctctccacataaccccatttcttcagtgtcttaacagtcatgtcttaagctgcatttccataggat

SEQ ID NO: 253 - protein, 467 aa, Homo sapiens
MHSTTPISSLFSFTSPAVKRLLGWKQGDEEEKWAEKAVDSLVKKLKKKKGAMDELERALSCPGQPSKCVTIPRSLDGRLQVSHRKGLPHVIYCRVWRWPDLQSHHELKPLECCEFPFGSKQKEVCINPYHYRRVETPVLPPVLVPRHSEYNPQLSLLAKFRSASLHSEPLMPHNATYPDSFQQPPCSALPPSPSHAFSQSPCTASYPHSPGSPSEPESPYQHSVDTPPLPYHATEASETQSGQPVDATADRHVVLSIPNGDFRPVCYEEPQHWCSVAYYELNNRVGETFQASSRSVLIDGFTDPSNNRNRFCLGLLSNVNRNSTIENTRRHIGKGVHLYYVGGEVYAECVSDSSIFVQSRNCNYQHGFHPATVCKIPSGCSLKVFNNQLFAQLLAQSVHHGFEVVYELTKMCTIRMSFVKGWGAEYHRQDVTSTPCWIEIHLHGPLQWLDKVLTQMGSPHNPISSVS

SEQ ID NO: 254 - DNA, 5857 bp, Homo sapiens
tgcaggtttgcagggtctgagattacttgggcttttcctgcctttttcttttgcttaagggatggacaaggagctgagatttatgacccttattagagaaaaaaatgtgccttgctagggtggggacacttggttgatgcagtctctctctctctttctcggtgtttataacaaaacaaaaccaaaatgaactgaggggtttgtaatggtagtttgtttgttgctggagaatgctactttgcatgctttttttctcttgcagggtatgttctgtcttgtgctttttcttttagaagctactaaagggtgttggggatgcttctgactattatgaaggccaaaaggcctgttgactggggctgcttttaaccctttcctatttgctgagaatgcagccgtgtgacagtaactg[450 bp omitted]cgatctccagtgctgaagagtttgatgacgacgagaagattgaggtggatgacccccctgacaaggaggacatgcgatcaagcttcaggtcgaatgtgttgacggggtcggctccccagcaggactacgataagctgaaggcactcggaggggaaaactccagcaaaactggactctctacgtcaggcaatgtggagaaaaacaaagctgttaagagagaaacagaagccagttctataaacctgagtgtttatgaaccttttaaagtcagaaaagcagaggataaattgaaggaaagctctgacaaggtgctggaaaacagagtcctagatgggaagctgagctccgagaagaatgacaccagcctccccagcgttgcgccatcaaagacaaagtcgtcctccaagctctcgtcctgcatcgctgccatcgcggctctcagcgctaaaaaggcggcttcagactcctgcaaagaaccagtggccaattcgagggaatcctccccgttaccaaaagaagtaaatgacagtccgagagccgctgacaagtctcctgaatcccagaatctcatcgacgggaccaaaaaaccatccctgaagcaaccggatagtcccagaagcatctcaagtgagaacagcagcaaaggatccccgtcctctcccgcagggtccacaccagcaatccccaaagtccgcataaaaaccattaagacatcttctggggaaatcaagagaacagtgaccagggtattgccagaagtggatcttgactctggaaagaaaccttccgagcagacagcgtccgtgatggcctctgtgacatcccttctgtcgtctccagcatcagccgccgtcctttcctctccccccagggcgcctctccagtctgcggtcgtgaccaatgcagtttcccctgcagagctcacccccaaacaggtcacaatcaagcctgtggctactgctttcctcccagtgtctgctgtgaagacggcaggatcccaagtcattaatttgaagctcgctaacaacaccacggtgaaagccacggtcatatctgctgcctctgtccagagtgccagcagcgccatcattaaagctgccaacgccatccagcagcaaactgtcgtggtgccggcatccagcctggccaatgccaaactcgtgccaaagactgtgcaccttgccaaccttaaccttttgcctcagggtgcccaggccacctctgaactccgccaagtgctaaccaaacctcagcaacaaataaagcaggcaataatcaatgcagcagcctcgcaaccccccaaaaaggtgtctcgagtccaggtggtgtcgtccttgcagagttctgtggtggaagctttcaacaaggtgctgagcagtgtcaatccagtccctgtttacatcccaaacctcagtcctcccgccaatgcagggatcacgttaccgacgcgtgggtacaagtgcttggagtgtggggactcctttgcacttgaaaagagtctgacccagcactacgacagacggagcgtgcgcatcgaagtaacgtgcaaccattgtacaaagaacctcgttttttacaacaaatgcagcctcctttcccatgcccgtgggcataaggagaaaggggtggtaatgcaatgctcccacttaattttaaagccagtcccagcagatcaaatgatagtttctccgtcaagcaatacttccacttcaacttccactcttcagagccctgtgggagctggcacacacactgtcacaaaaattcagtctggcataactgggacagtcatatcggctccttcaagcactcccatcaccccagccatgcccctagatgaagacccctccaaactgtgtagacatagtctaaaatgtttggagtgtaatgaagtcttccaggacgagacatcactggctacacatttccagcaggctgcagatacgagtggacaaaagacttgcactatctgccagatgctgcttcctaaccagtgcagttatgcatcacaccagagaatccatcagcacaaatctccctacacctgccctgagtgtggggccatctgcaggtcggtgcacttccagacccacgtcaccaagaactgtctgcactacacgaggagagttggttttcgatgtgtgcattgcaatgttgtgtactctgatgtggctgctctgaagtctcacattcaaggttctcactgtgaagtcttctacaagtgtcctatttgtccaatggcgtttaagtctgccccaagcacacattcccacgcctacacacagcatcctggcatcaagataggagaaccaaaaataatatataagtgttccatgtgcgacactgtgttcaccctgcaaaccttgctgtatcgccactttgaccaacacattgaaaaccagaaggtgtctgttttcaagtgtccagactgttctcttttatatgcacagaagcaacttatgatggaccatatcaagtctatgcatggaacattgaaaagtattgaagggcctccaaacttgggtataaacttgcctttgagcattaagcctgcaactcaaaattcagcaaatcagaacaaagaggacaccaaatccatgaatgggaaagagaaattggaaaagaaatctccatctcctgtgaaaaaatcaatggaaaccaagaaagtggccagtcctgggtggacgtgttgggagtgtgactgcctgttcatgcagagagatgtgtacatatcccacgtgaggaaggagcacgggaagcaaatgaagaaacacccctgccgccagtgtgacaagtctttcagctcgtcccacagcctgtgccggcacaaccggatcaagcacaaaggcatcaggaaagtgtacgcctgctcgcactgcccagactccagacgtacctttaccaaacgtttgatgctggagaagcacgtccagctgatgcatggcatcaaggaccctgacctgaaagaaatgacagatgccaccaatgaggaggaaacagaaataaaagaagacactaaggtccccagtcccaagcggaagttggaagaaccagttctggagttcaggcctccccgaggagcaatcactcaaccactgaaaaagctgaaaatcaatgtttttaaggttcacaagtgtgccgtgtgtggcttcaccaccgaaaacctgctgcaattccacgaacacatccctcagcacaaatcggatggttcttcctaccagtgccgggagtgtggcctctgctacacgtctcacgtctctctgtccaggcacctcttcatcgtacacaagttaaaggaacctcagccagtgtccaagcaaaatggggctggggaagataaccaacaggagaacaaacccagccacgaggatgaatcccctgatggcgccgtgtcagacagaaagtgcaaagtgtgcgcaaaaacttttgaaactgaagctgccttaaatactcacatgcggacacacggcatggccttcatcaaatccaaaaggatgagctcagccgagaaatagccacagatgctccatgaggaaaatccctgtccacattggaataaaaaagacatttttgttacaaagtttgcagtataatagagttaacagtactgtctaggctgttgcaatatattctctttcaatgtaccttccttcacctcgtcgtatatatcctcgataagtattaaaacagtatttgagtttaaaagagtttgtatatatttaaatgaataactttttatactctttgttacatgtttgtatcagtatttagtggaaaaccatttgagttgttttgggttagaatttttctttttgtactgtttctttaaaacagagttcttagtaacaggggcagttcctgaattcaaataaaccattttgtatgtttggattttgaatgggttaactaattacaggctaaaataatgccttttttagtgtttttaatttttagaattcactacataaattgtaagtaattgtgggtctcaaaaacactaggaacttttaagtgtcttagcacttcctcgatgtgcctgccctgagggagtgagttcacatttgagacaactgcactccagtgtggacgtgcctttgtcttcaggccatgccgaagggtgtttaaagcagtcttgcaggtcgctcctttcccagccgtggataaaaactgaagctaggaatctaataaggaatgctgatttcctcagttccattttgaggaatggggaaggctattctaaagaaaaaaatgggatttgttttctcggcagatctgcaaggctggctttaagagcacaaggagggaaagtaacgaaagggctggactactataaaagttacaaatacgtagttagaccaatagatttatatagtcaggtttttgtcatgtaatttattaactaactattacagaaacacagctaagaatatcaagtatttctctggctcttgacagaaaaaaatcagttgacttaaccctttgctgtcaaaagagttggcgtttcctgttctgggtgctactgccaaacgttatggtacttagagtcgggatgcacaacttcaaccaccgacttatcaatgcagccgcctgtgtattgcaattggccgttaccttaagcactgagccacccgggtttagttcagccatttcaagaagtatatttaacgtcggtagttctgctttattaaaatgcagcagaggtactcttctgtcccttccgtttatagttctctgagagagttctattttttggttttgttttgtgttttcttttgcattttgtatcttgtatttatccctgaacatgttttgtaccttttttttttttttttttttaagaaaaggaattcttttgtgtatatatagatacttgcatgatatactgtagtcaatgttcggttcctcaaaaggtcttgctgctgtcaggtgttatgcactccatccatcataactgtatgaaacacatttcatatgtaaataaacgtgggacatttg

SEQ ID NO: 255 - protein, 1296 aa, Homo sapiens [sequence omitted]

SEQ ID NO: 256 - DNA, 2788 bp, Homo sapiens
ttttcgtcgactcttaccggttggctgggccagctgcgccgcggctcacagctgacgatgggggaccccagcaagcaggacatcttgaccatcttcaagcgcctccgctcggtgcccactaacaaggtgtgttttgattgtggtgccaaaaatcccagctgggcaagcataacctatggagtgttcctttgcattgattgctcagggtcccaccggtcacttggtgttcacttgagttttattcgatctacagagttggattccaactggtcatggtttcagttgcgatgcatgcaagtcggaggaaacgctagtgcatcttccttttttcatcaacatgggtgttccaccaatgacaccaatgccaagtacaacagtcgtgctgctcagctctatagggagaaaatcaaatcgctcgcctctcaagcaacacggaagcatggcactgatctgtggcttgatagttgtgtggttccacctttgtcccctccaccaaaggaggaagatttttttgcctctcacgtttctcctgaggtgagtgacacagcgtgggcatcagcaatagcagaaccatcttctttaacatcaaggcctgtggaaaccactttggaaaataatgaaggtggacaagagcaaggaccaagtgtggaaggtcttaatgtaccaacaaaggctactttagaggtatcctctatcataaaaaagaaaccaaatcaagctaaaaaaggccttggggccaaaaaaggaagtttgggagctcagaaactggcaaacacatgctttaatgaaattgaaaaacaagctcaagctgcggataaaatgaaggagcaggaagacctggccaaggtggtatctaaagaagaatcaattgtttcatcattacgattagcctataaggatcttgaaattcaaatgaagaaagacgaaaagatgaacattagtggcaaaaaaaatgttgactcagacagactcggcatgggatttggaaattgcagaagtgttatttcacattcagtgacttcagatatgcagaccatagagcaggaatcacccattatggcaaaaccaagaaaaaagtataatgatgacagtgacgattcatattttacttccagctcaagttactttgacgagccagtggagttaaggagcagttctttctctagctgggatgacagttcagattcctattggaaaaaagagaccagcaaagatactgaaacagttctgaaaaccacaggctattcagacagacctactgctcgccgcaagccagattatgagccagttgaaaatacagatgaggcccagaagaagtttggcaatgtcaaggccatttcatcagatatgtattttggaagacaatcccaggctgattatgagaccagggcccgcctagagaggctgtcggcaagttcctccataagctcggctgatctgttcgaggagccgaggaagcagccagcagggaactacagcctgtccagtgtgctgcccaacgcccccgacatggcgcagttcaagcagggagtgagatcggttgctggaaaactctccgtctttgctaatggagtcgtgacttcaattcaggatcgctacggttcttaatactgaagtcatgatgtgtatttcctggagaaattcctctttaaatgaacaagtaaccacatctcaggcggcagtgaagtccagatagttttgcagattgttttgctactttttcatatggtatatgtttctgatttttaatatttcttttgagaaattctgagttctgatgtaggagctttcctgtgatttctgtttcacgttccttcctgtcacaccctcctttggcgtctctgtgtatatccttgctttattttcttggaacctttgatttcaacactgagggcctggagacctcggctcctcctgctcctgaaccaggaggcttcatgtgggggaggaggagaggtctccatgtgacacatgggctcagggctgccagaatcagcggatgctggatgggcctgcagaaacaacactcaccacacacacttccttcaaaagaccaaaagtgactggtgtctcgtgtgacagattgcttcatttatgtttctacatagtaaggtgactgccaaataatatttgaagtcatctgtctctttgtaaattattttatatgacctataaatttaaaaatgtttttcagtgagtgcttttaacaaacttaagcttctgccctgccaagggaattaatgttatcttgtgaaaggtgttgctgtttgaattgatgagaaatggaagatgagaactccctaagagttctcataataaatcatctcatcacaaatcaatacggtatacagagttaaagtggaatgaggtaagaagatacagctacagaaaatagttgcgtgtatgggagaacagtcattgtaattgggtagttttgttaataaatatttttaaatcttgcttttcagaaattaccgaatgtgtataaacaaataaagaaaaataatttagctgtgttttagacagcattagaatatattgttcagcacagtaaaatatatttgaaatttgataagccaaaaatgtggttttgaatgaatattttgtgaatctttcttaaaagctcaaatttgtagacttctaaatagaataaacacttgcagcagaaaaaaaaaaaaaaaaaaaaaaaaaaaaaaaaaaaaaaaaaaaaaaaaaaaaaaaaaaaaaaaaaaaaaaaaaaaaaaaaaaaaaaaaaaaaaaaaaaaaaaaaaaaaaaaaaaaaaaaaaa

SEQ ID NO: 257 - protein, 516 aa, Homo sapiens
MGDPSKQDILTIFKRLRSVPTNKVCFDCGAKNPSWASITYGVFLCIDCSGSHRSLGVHLSFIRSTELDSNWSWFQLRCMQVGGNASASSFFHQHGCSTNDTNAKYNSRAAQLYREKIKSLASQATRKHGTDLWLDSCVVPPLSPPPKEEDFFASHVSPEVSDTAWASAIAEPSSLTSRPVETTLENNEGGQEQGPSVEGLNVPTKATLEVSSIIKKKPNQAKKGLGAKKGSLGAQKLANTCFNEIEKQAQAADKMKEQEDLAKVVSKEESIVSSLRLAYKDLEIQMKKDEKMNISGKKNVDSDRLGMGFGNCRSVISHSVTSDMQTIEQESPIMAKPRKKYNDDSDDSYFTSSSSYFDEPVELRSSSFSSWDDSSDSYWKKETSKDTETVLKTTGYSDRPTARRKPDYEPVENTDEAQKKFGNVKAISSDMYFGRQSQADYETRARLERLSASSSISSADLFEEPRKQPAGNYSLSSVLPNAPDMAQFKQGVRSVAGKLSVFANGVVTSIQDRYGS

SEQ ID NO: 258 - DNA, 5571 bp, Homo sapiens
atggatactgtcatgaagcagacacatgctgacacacctgttgatcattgtctatctggcataagaaagtgtagcagcacctttaagcttaaaagtgaagtcaacaagcatgaaacagcccttgaaatgcagaatccaaatttgaacaataaagaatgttgtttcacctttacgttgaatggaaactccagaaaattagaccgtagtgtgtttacagcatatggtaaacccagcgagagtatctactcagccctgagtgctaatgactatttcagtgaaaggataaagaatcagtttaataagaacattattgtttatgaagaaaagacaatagatggacatataaatttaggaatgcctctcaagtgcctgcctagtgattctcattttaaaattacatttggtcaaagaaagagtagcaaagaagatggacacatattacgccaatgtgaaaatccaaacatggaatgcattctttttcatgttgttgctataggaaggacaagaaagaagattgttaagatcaacgaacttcatgaaaaaggaagtaaactttgtatttatgccttgaagggtgagactattgaaggagccttatgcaaggatggccgttttcggtctgacataggtgaatttgaatggaaactaaaggaaggtcataagaaaatttatggaaaacagtccatggtggatgaagtatctggaaaagtcttagaaatggacatttcaaaaaaaaaagcattacaacagaaagatatccataaaaaaattaaacagaatgaaagtgccactgatgaaattaatcaccagagtctgatacagtctaagaaaaaagtccacaaaccaaagaaagatggagagaccaaagatgtagaacacagcagagagcaaattctcccacctcaggatctaagccattatattaaagataaaactcgccagacaattcccaggattagaaattattacttttgtagtttgccccgaaaatataggcaaataaactcacaagttagacggaggccgcatctgggtaggcggtatgctattaatctggatgtccaaaaggaggcaattaatctcttaaagaattatcaaacgttgaatgaagccataatgcatcagtatccgaattttaaagaggaggcacagtgggtaagaaaatattttcgggaagaacaaaagagaatgaatctttcaccagctaagcaattcaacatatataaaaaggacttcggaaaaatgactgcaaattctgtttcagttgcaacctgcgaacagcttacatattatagcaagtcagttgggttcatgcaatgggacaataatggaaacacaggtaatgctacttgctttgtcttcaatggtggttatattttcacctgtcgacatgttgtacatcttatggtgggtaaaaacacacatccaagtttgtggccagatataattagcaaatgtgcgaaggtaaccttcacttatacagagttctgccctactcctgacaattggttttccattgagccatggcttaaagtgtccaatgaaaatctagattatgccattttaaaactaaaagaaaatggaaatgcgtttcctccaggactatggcgacagatttctcctcaaccatctactggtttgatttatttaattggtcatcctgaaggccagatcaagaaaatagatggttgtactgtgattcctctaaacgaacgattgaaaaaatatccaaacgattgtcaagatgggttggtagatctctatgataccaccagtaatgtatactgtatgtttacccaaagaagtttcctatcagaggtttggaacacacacacgcttagttatgatacttgtttctctgatgggtcctcaggctccccagtgtttaatgcatctggcaaattggttgctttgcatacctttgggcttttttatcaacgaggatttaatgtgcatgcccttattgaatttggttattctatggattctattctttgtgatattaaaaagacaaatgagagcttgtataaatcattaaatgatgagaaacttgagacctacgatgaagagaaagcccggcccaggccagcctaccggcgactaggatgctttcgctttcgctctcgctttccaatactcgggactggggaaaccgggagaatagaagcaggcaaggaccgccgtgggcacggggtcagtgagacagggtcctgctcgcggcgtcaaggaggagcgctgtgggtgtccccagcgcagccaatcggcttccgaagtagctggagctctggagcctttgcttcctcaaatacgagcgggaactgcgttgagcgctggattccaggccgagtgctggcgaggcgcgcagtctctaaagagcaacagaataattgcagtacttctctaatgaggatggagtctagaggagacccaagagccacaactaatacccaggctcaaagattccattcacctaagaaaaatccagaagaccagaccatgccccaaaataggacaatatatgttaccttgaaggctgtcagaaaagagatagaaactcaccaaggccaagaaatgcttgtgcgtggcacagaaggaatcaaagagtacataaaccttggaatgcccctcagttgtttccctgaaggtggccaggtggtcattacattttcccaaagtaaaagtaagcagaaggaagataaccacatatttggcaggcaggacaaagcatcgactgaatgtgtcaaattttacattcatgcaattggaattgggaagtgtaaaagaaggattgttaaatgtgggaagcttcacaaaaaggggcgcaaactctgtgtttatgctttcaaaggagaaaccatcaaggatgcactgtgcaaggatggcagatttctttcctttctggagaatgatgattggaaactcattgaaaacaatgacaccattttagaaagcacccagccagttgatgaattagaaggcagatactttcaggttgaggttgagaaaagaatggtccccagtgcagcagcttctcagaatcctgagtcagagaaaagaaacacctgtgtgttgagagaacaaatcgtggctcagtaccccagtttgaaaagagaaagtgaaaaaatcattgaaaacttcaagaaaaaaatgaaagtaaaaaatggggaaacattatttgaattgcatagaacaacgtttgggaaagtaacaaaaaattcttcttcgattaaagtagtgaaacttcttgtacgtctcagtgactcagttgggtacttattctgggacagtgcaactacgggttacgccacctgctttgtttttaaaggattgttcattttaacttgtcggcatgtaatagatagcattgtgggagacggaatagagccaagtaagtgggcaaccataattggtcaatgtgtaagggtgacatttggttatgaagagctaaaagacaaggaaacaaactacttttttgttgaaccttggtttgagatacataatgaagagcttgactatgctgtcctgaaactgaaggaaaatggacaacaagtacctatggaactatataatggaattactcctgtgccacttagtgggttgatacatattattggccatccatatggagaaaaaaagcagattgatgcttgtgctgtgatccctcagggtcagcgagcaaagaaatgtcaggaacgtgttcagtctaaaaaagcagaaagtccagagtatgtccatatgtatactcaaagaagtttccagaaaatagttcacaaccctgatgtgattacctatgacactgaatttttctttggggcttccggctcccctgtgtttgattcaaaaggttcattggtggccatgcatgctgctggctttgcttatacttaccaaaatgagactcgtagtatcattgagtttggctctaccatggaatccatcctccttgatattaagcaaagacataaaccatggtatgaagaagtatttgtaaatcagcaggatgtagaaatgatgagtgatgaggacttgtgagaattcagtctactggatttaagggaatggcttatggagttgttatttcgtaggcattgaaaatggttttctaaactccaaaatggtcatcttatcaataataataatattgaccatttcctatctgccaggcatttttctaagcacatgaagaaattagtcctaacaacactatgagatggactataacttgcccaaattttttttttttttgagactgagtctcactctgtcgcctgggctggagtacagtggtgcgatctcagctcactgcaacttccacctcccaggttcaagcgattcttatgcctcagtctcctgagcagctgggattacaggcaaacgccaccacacccagctaaattttttttttttttttgtatttttagtagagacagggtttcaccatgttggtcaggcgggtctcgaactcctgacctcgtgatccacctgcctcggccttccaaagtgctgggattacaagtttgagccactgcacctggctaacttgccctattttaaagtcaagcaatgggaagaataacaagattatatagtaatcagtttcatgacactaaaagtcatatagtcatagggttttttcatctttcatatctttgcctaaattcatttgctacagtgcaggaaccaaaacttgttcatctcatgattccctacatctgacataaggaaagtaagtgctcagaaaaatgtgcaggtcaataagttgcaaaagttggggctgcaattaatgctaacataagagctaaatgcttgattagaaatgatctcaaaaccttttagaatttccaaaatcttcatattactgaaactgtcggaatatatgggtcctgaaattcagaagatgatagtcactcttcccatatttataggctattaaggcaagggatatcttaaacatcatattactttatttagatttctactactccaattattaatgttatgtatttctcattgttttacttcttcatggtattatgaagactatatagatgattcaaccaagcctgcaaatctccctcttgtggaattccactggacccaatctgttttccatttccattgcaatactactaaagccatacaatatcaagcaccctccctctaggtccagggactatcacagaagaagcaggcatgtaagattttaaggactggtttcgaggggtcgagtgtaggaaaacagcctgttgcattgtaagagtgatgtcaccttgaagagcagctggcatgatgactgctgtttgactcctgcataccaagatattctgcagcaatgtctttaaacagtgccggtagtacagataacccctcataaagatgcttatctaacctccccagtgttcaggtgtttcacaagaaagtctgagatatgactagctacacgttttgccaaaaatgcttgttatataaagggtacttttgggagggtgagtgccgccatttagtggctgctagaaacattgcttctgtttgtaagttcctattaaatgttctttctgagaaaaaaaaaaa

SEQ ID NO: 259 - protein, 1343 aa, Homo sapiens [sequence omitted]

SEQ ID NO: 260 - DNA, 2829 bp, Homo sapiens
acatttcaaaaaaaatacatagactgatgtttcagacttgtgcagcataagcctacagggtacgaagaatgaactctgagaatgtttggagaatgtttcatcattactaacaggatattcctcatgacattgctgtctgatctttgaccatcagtctgtgacctgccccttctctttacatgcagccgctctctgctccctgccccaatgaacatctgcactaggcccaagccttggagtaatttacctgaagagtgacaccattgattttgaaactactgaagaaacccaagacagctgaaaaccagaaggcatctgaggagaatgagattactcagccgggtggatccagcgccaagccgggccttccctgcctgaactttgaagctgttttgtctccagacccagccctcatccactcaacacattcactgacaaactctcacgctcacaccgggtcatctgattgtgacatcagttgcaaggggatgaccgagcgcattcacagcatcaaccttcacaacttcagcaattccgtgctcgagaccctcaacgagcagcgcaaccgtggccacttctgtgacgtaacggtgcgcatccacgggagcatgctgcgcgcacaccgctgcgtgctggcagccggcagccccttcttccaggacaaactgctgcttggctacagcgacatcgagatcccgtcggtggtgtcagtgcagtcagtgcaaaagctcattgacttcatgtacagcggcgtgctacgggtctcgcagtcggaagctctgcagatcctcacggccgccagcatcctgcagatcaaaacagtcatcgacgagtgcacgcgcatcgtgtcacagaacgtgggcgatgtgttcccggggatccaggactcgggccaggacacgccgcggggcactcccgagtcaggcacgtcaggccagagcagcgacacggagtcgggctacctgcagagccacccacagcacagcgtggacaggatctactcggcactctacgcgtgctccatgcagaatggcagcggcgagcgctctttttacagcggcgcagtggtcagccaccacgagactgcgctcggcctgccccgcgaccaccacatggaagaccccagctggatcacacgcatccatgagcgctcgcagcagatggagcgctacctgtccaccacccccgagaccacgcactgccgcaagcagccccggcctgtgcgcatccagaccctagtgggcaacatccacatcaagcaggagatggaggacgattacgactactacgggcagcaaagggtgcagatcctggaacgcaacgaatccgaggagtgcacggaagacacagaccaggccgagggcaccgagagtgagcccaaaggtgaaagcttcgactcgggcgtcagctcctccataggcaccgagcctgactcggtggagcagcagtttgggcctggggcggcgcgggacagccaggctgaacccacccaacccgagcaggctgcagaagcccccgctgagggtggtccgcagacaaaccagctagaaacaggtgcttcctctccggagagaagcaatgaagtggagatggacagcactgttatcactgtcagcaacagctccgacaagagcgtcctacaacagccttcggtcaacacgtccatcgggcagccattgccaagtacccagctctacttacgccagacagaaaccctcaccagcaacctgaggatgcctctgaccttgaccagcaacacgcaggtcattggcacagctggcaacacctacctgccagccctcttcactacccagcccgcgggcagtggccccaagcctttcctcttcagcctgccacagcccctggcaggccagcagacccagtttgtgacagtgtcccagcccggtctgtcgacctttactgcacagctgccagcgccacagcccctggcctcatccgcaggccacagcacagccagtgggcaaggcgaaaaaaagccttatgagtgcactctctgcaacaagactttcaccgccaaacagaactacgtcaagcacatgttcgtacacacaggtgagaagccccaccaatgcagcatctgttggcgctccttctccttaaaggattaccttatcaagcacatggtgacacacacaggagtgagggcataccagtgtagtatctgcaacaagcgcttcacccagaagagctccctcaacgtgcacatgcgcctccaccggggagagaagtcctacgagtgctacatctgcaaaaagaagttctctcacaagaccctcctggagcgacacgtggccctgcacagtgccagcaatgggaccccccctgcaggcacacccccaggtgcccgcgctggccccccaggcgtggtggcctgcacggaggggaccacttacgtctgctccgtctgcccagcaaagtttgaccaaatcgagcagttcaacgaccacatgaggatgcatgtgtctgacggataagtagtatctttctctctttcttatgaacaaaacaaaacaacaacaaaaaacaaacaaacaaaaaagctatggcactagaatttaagaaatgttttggtttcatttttactttctgtttttgtttttgtttcgtttcattttgtactacatgaagaactgttttttgcctgctggtacattacatttccggaggcttgggtgaataatagttttcccagtctccctcggatggtggccttaaggcctggtagtgcttcaagaggtccactggttggatctctagctactggcctctaaatacaacccttctttacaaaaaaaaaaaaaaaaaaaa

SEQ ID NO: 261 - protein, 668 aa, Homo sapiens
MTERIHSINLHNFSNSVLETLNEQRNRGHFCDVTVRIHGSMLRAHRCVLAAGSPFFQDKLLLGYSDIEIPSVVSVQSVQKLIDFMYSGVLRVSQSEALQILTAASILQIKTVIDECTRIVSQNVGDVFPGIQDSGQDTPRGTPESGTSGQSSDTESGYLQSHPQHSVDRIYSALYACSMQNGSGERSFYSGAVVSHHETALGLPRDHHMEDPSWITRIHERSQQMERYLSTTPETTHCRKQPRPVRIQTLVGNIHIKQEMEDDYDYYGQQRVQILERNESEECTEDTDQAEGTESEPKGESFDSGVSSSIGTEPDSVEQQFGPGAARDSQAEPTQPEQAAEAPAEGGPQTNQLETGASSPERSNEVEMDSTVITVSNSSDKSVLQQPSVNTSIGQPLPSTQLYLRQTETLTSNLRMPLTLTSNTQVIGTAGNTYLPALFTTQPAGSGPKPFLFSLPQPLAGQQTQFVTVSQPGLSTFTAQLPAPQPLASSAGHSTASGQGEKKPYECTLCNKTFTAKQNYVKHMFVHTGEKPHQCSICWRSFSLKDYLIKHMVTHTGVRAYQCSICNKRFTQKSSLNVHMRLHRGEKSYECYICKKKFSHKTLLERHVALHSASNGTPPAGTPPGARAGPPGVVACTEGTTYVCSVCPAKFDQIEQFNDHMRMHVSDG

SEQ ID NO: 262 - DNA, 912 bp, Homo sapiens
atggtggaagaggaaacaggcatatcttacatggtggcagacaagggacacccttctacaaactctaccacttctgcgccgtcgtttcgaccatataaaaacgacctatgcgaactgcgtcggaaaactccctcacgatgtaaaacgaagatcaggagcagatttgaagaattacaaagtgaattggtgccagtcagcatgtcagagacagaccacatagcctctacttcctctgataaaaatgttgggaaaacacctgaattaaaggaagactcatgcaacttgttttctggcaatgaaagcagcaaattagaaaatgagtccaaactattgtcattaaacactgataaaactttatgtcaacctaatgagcataataatcgaattgaagcccaggaaaattatattccagatcatggtggaggtgaggattcttgtgccaaaacagacacaggctcagaaaattctgaacaaatagctaattttcctagtggaaattttgctaaacatatttcaaaaacaaatgaaacagaacagaaagtaacacaaatattggtggaattaaggtcatctacatttccagaatcagctaatgaaaagacttattcagaaagcccctatgatacagactgcaccaagaaatttatttcaaaaataaagagcgtttcagcatcagaggatttgttggaagaaatagaatctgagctcttatctacggagtttgcagaacatcgagtaccaaatggaatgaataagggagaacatgcattagttctgtttgaaaagtgtgtgcaagataaatatttgcagcaggaacatatcataaaaaaggccagacttggtctctgttatttgccatcaagaacctcaattgacacgttaattccgtttatcccaaatttatatagataa

SEQ ID NO: 263 - protein, 219 aa, Homo sapiens
MEPKEATGKENMVTKKKNLAFLRSRLYMLERRKTDTVVESSVSGDHSGTLRRSQSDRTEYNQKLQEKMTPQGECSVAETLTPEEEHHMKRMMAKREKIIKELIQTEKDYLNDLELCVREVVQPLRNKKTDRLDVDSLFSNIESVHQISAKLLSLLEEATTDVEPAMQVIGEVFLQIKGPLEDIYKIYCYHHDEAHSILESYEKEEELKEHLSHCIQSLK

SEQ ID NO: 264 - DNA, 3812 bp, Homo sapiens
gggcctactctgccgccgccgccgcccgcccgctccagccgccgccgccgccgccaccgccctccaggctccgggacccggcccgcgccaccgcccccgtgcgcgccccgccgccgccgccttcgccttcgccttttgtttcctccgctccggcgcccccgccccggctcgcgctttgcaggggacgcagcgcgcgcccccagcgggcccgggaaaagccgcggcgcgcgcgcgcgcctgcgcggcggacccctccttctcctccccgcgtgcgcgtgcccttcttggctgcgcgccggcgccgcctggcgggcgggaggggaggtggcaggcgcgtttgcaggaggggcgcacctcttcgctcgcgcacccccccggaaggtagaccgggaaggggaggcgggcgggcggagaggagagagtggcgcgcagtccagcgagggcgggggttggctatgtggggggtggtgcaccccgcagtctagacagtctgatccgggctgggggcgtgtacactcggcgcacctgcgagactacagagcctcgggccggcacgtgtggggagtgtggacacgtctgctgcgccccgcttctcgctgctgaggggaagggagggggcgggcaggtgcagcggccgggctagtgggagggggcggcggccatggagcgggtgaacgacgcttcgtgcggcccgtctggctgctacacataccaggtgagcagacacagcacggagatgctgcacaacctgaaccagcagcgcaaaaacggcgggcgcttctgcgacgtgctcttgcgggtaggcgacgagagcttcccagcgcaccgcgccgtgctggccgcctgcagcgagtactttgagtcggtgttcagcgcccagttgggcgacggcggagctgcggacgggggtccggctgatgtagggggcgcgacggcagcaccaggcggcggggccgggggcagccgggagctggagatgcacactatcagctccaaggtatttggggacattctggacttcgcctacacttcccgcatcgtggtgcgcttggagagctttcccgaactcatgacggccgccaagttcctgctgatgaggtcggttatcgagatctgccaggaagtcatcaaacagtccaacgtacagatcctggtaccccctgcccgcgccgatataatgctctttcgcccccctgggacctcggacttgggcttccctttggacatgaccaacggggcagccttggcagccaacagcaatggcatcgccggcagcatgcagccagaggaggaggcagctcgggcggctggtgcagccattgcaggccaagcctctttgcctgtgttacctggggtggaccgcttgcccatggtggctggacccctatccccccaactgctgacttccccattccccagtgtggcatccagtgcccctcccctgactggcaagcgaggccggggccgcccaaggaaggccaacctgctggactcaatgtttgggtccccagggggcctgagggaggcaggcatccttccatgcggtctatgtggtaaggtgttcactgatgccaaccggctccggcagcacgaggcccagcacggtgtcaccagcctccagctgggctacatcgaccttcctcctccgaggctgggtgagaatgggctacccatctctgaagaccccgacggcccccgaaagaggagccggaccaggaagcaggtggcttgtgagatctgcggcaagatcttccgtgatgtgtatcatcttaaccggcacaagctgtcccactctggggagaagccctactcctgccctgtgtgtgggttgcggttcaagagaaaagaccgcatgtcctaccatgtgcggtcccatgatgggtccgtgggcaagccttacatctgccagagctgtgggaaaggcttctccaggcctgatcacttgaacggacatatcaagcaggtgcacacttctgagcggcctcacaagtgtcagacctgcaatgcttcttttgccacccgagaccgtctgcgctcccacctggcctgtcatgaagacaaggtgccctgccaggtgtgtgggaagtacttgcgggcagcatacatggcagaccacctgaagaagcacagcgaggggcccagcaacttctgcagtatctgtaaccgaggtttctcctctgcctcctacttaaaggtccatgttaaaacccaccacggtgttccccttccccaggtctccaggcaccaggagcccatcctgaatgggggagcagcgttccactgcgccaggacctatggcaacaaagaaggccagaaatgctcacatcaggatccgattgagagctctgactcctatggtgacctctcagatgccagcgacctgaagacgccagagaagcagagtgccaatggctctttctcctgcgacatggcagtccccaaaaacaaaatggagtctgatggggagaagaagtacccatgccctgaatgtgggagcttcttccgctctaagtcctacttgaacaaacacatccagaaggtgcatgtccgggctctcgggggccccctgggggacctgggccctgcccttggctcacctttctctcctcagcagaacatgtctctcctcgagtcctttgggtttcagattgttcagtcggcatttgcgtcatctttagtagatcctgaggttgaccagcagcccatggggcctgaagggaaatgaggcagctgctgtgtccccacggaaacaaccatctggggactgctgggaaatgctgtgaatgcggagggaagtgatgtttgggttctgtagctgagagatttttattcatttttaactgccccccaaccccactccaactccttctccaccacccattctcccaatggtctttagaaatagattttcatctgatattctgcagaaatatcaatgagacttggtatgggacaggggcagaaaacactacataggcctccaaggcaaaaccagtcccagtttctttaatgggaagaagctggaattcctggtgctcaattcttagtgaccccaatcctatacccaaatctatgatattctgggacctcagtgattttggtcccctcccacttctctagttcgtcatcctcccttcccatatccttcaaaagaaccacactagggtctccacctacttatacaatgcggatgcccaactgtttttaaggaagccagaagcatcccatggaccatggggtgagtgtcctccaagagccccctgagctcagccctctgcctggagggctccagacctttctgagccctgcttggaggcgagcattttcactgctaggacaagctcagctgttgaggacacccccaccccaaatttcagttcttacgtgattttaaccattcaacatgctgttgggttttaattctctaattattattattattgttattattttttaggaccagttgtagtgaattgctactgaaagctatcccaggtgatacagagctctttgtaaaccgcagtcacacattagggttagtattaaactttgtttagatgtaccataattaacttggctagttgattgtttgaagtctatggaagaaatagttttatgcaaaattttaaaaaatgccagtctggtcagggaagtagggggtttcaatgctgttgggaaccaggaaggtgggacagccggcaggtagggacattgtgtacctcagttgtgtcacatgtgagcaagcccaggttgaccttgtgatgtgaattgatctgatcagactgtattaaaaatgttagtacattactcta

SEQ ID NO: 265 - protein, 641 aa, Homo sapiens
MERVNDASCGPSGCYTYQVSRHSTEMLHNLNQQRKNGGRFCDVLLRVGDESFPAHRAVLAACSEYFESVFSAQLGDGGAADGGPADVGGATAAPGGGAGGSRELEMHTISSKVFGDILDFAYTSRIVVRLESFPELMTAAKFLLMRSVIEICQEVIKQSNVQILVPPARADIMLFRPPGTSDLGFPLDMTNGAALAANSNGIAGSMQPEEEAARAAGAAIAGQASLPVLPGVDRLPMVAGPLSPQLLTSPFPSVASSAPPLTGKRGRGRPRKANLLDSMFGSPGGLREAGILPCGLCGKVFTDANRLRQHEAQHGVTSLQLGYIDLPPPRLGENGLPISEDPDGPRKRSRTRKQVACEICGKIFRDVYHLNRHKLSHSGEKPYSCPVCGLRFKRKDRMSYHVRSHDGSVGKPYICQSCGKGFSRPDHLNGHIKQVHTSERPHKCQTCNASFATRDRLRSHLACHEDKVPCQVCGKYLRAAYMADHLKKHSEGPSNFCSICNREGQKCSHQDPIESSDSYGDLSDASDLKTPEKQSANGSFSCDMAVPKNKMESDGEKKYPCPECGSFFRSKSYLNKHIQKVHVRALGGPLGDLGPALGSPFSPQQNMSLLESFGFQIVQSAFASSLVDPEVDQQPMGPEGK

SEQ ID NO: 266 - DNA, 2818 bp, Homo sapiens
ccctactccgcctctcgggatcctttaagaggcggggcttggctgccagctccgcggcccgggcaaaaggctgggactttactccgggtggcggcgaggacgagtctgtgctccatcagctgccgcacccgccgcctcccgcccccaaaccccatccccgcggttgagccacgatgagcggcagagtcggcgatctgagccccaggcagaaggaggcattggccaagtttcgggagaatgtccaggatgtgctgccggccctgccgaatccagatgactattttctcctgcgttggctccgagccagaagcttcgacctgcagaagtcggaggccatgctccggaagcatgtggagttccgaaagcaaaaggacattgacaacatcattagctggcagcctccagaggtgatccaacagtatctgtcagggggtatgtgtggctatgacctggatggctgcccagtctggtacgacataattggacctctggatgccaagggtctgctgttctcagcctccaaacaggacctgctgaggaccaagatgcgggagtgtgagctgcttctgcaagagtgtgcccaccagaccacaaagttggggaggaaggtggagaccatcaccataatttatgactgcgaggggcttggcctcaagcatctctggaagcctgctgtggaggcctatggagagtttctctgcatgtttgaggaaaattatcccgaaacactgaagcgtctttttgttgttaaagcccccaaactgtttcctgtggcctataacctcatcaaacccttcctgagtgaggacactcgtaagaagatcatggtcctgggagcaaattggaaggaggttttactgaaacatatcagccctgaccaggtgcctgtggagtatgggggcaccatgactgaccctgatggaaaccccaagtgcaaatccaagatcaactacgggggtgacatccccaggaagtattatgtgcgagaccaggtgaaacagcagtatgaacacagcgtgcagatttcccgtggctcctcccaccaagtggagtatgagatcctcttccctggctgtgtcctcaggtggcagtttatgtcagatggagcggatgttggttttgggattttcctgaagaccaagatgggagagaggcagcgggcaggggagatgacagaggtgctgcccaaccagaggtacaactcccacctggtccctgaagatgggaccctcacctgcagtgatcctggcatctatgtcctgcggtttgacaacacctacagcttcattcatgccaagaaggtcaatttcactgtggaggtcctgcttccagacaaagcctcagaagagaagatgaaacagctgggggcaggcaccccgaaataacaccttctcctatagcaggcctggccccctcagtgtctccctgtcaatttctaccccttgtagcagtcattttcgcacaaccctgaagcccaaagaaactgggctggaggacagacctcaggagctttcatttcagttaggcagaggaagagcgactgcagtgggtctccgtgtctatcaaatacctaaggagtccccaggagctggctggccatcgtgataggatctgtctgtcctgtaaactgtgccaacttcacctgtccagggacagcgaagctgggggtggcggggggcatgtaccacagggtggcagcagggaaaaaaattagaaaagggtgaaagattgggacttaacacttcagggaagtcagctgccggggagaaacttgctcctaaatgaacacataagtttagatcgcaatgaggagtagcagggtagctggttgctagagttacggtggggatcagaaactcttccaaacattttagcactgaggctggggtagcttttggcttttcccaggtctcaggaggtggcctgagtcagcacacatcttcccactcggtagacaggctggcctctccctcactttgagactttggcaactcctgggccacacggcctgcctctttgattactaatgattgtcagtgactcagagcttcctgggacttcgggtacccacccgctgttctccatgcaaacaaagcgccagggaaatgacccacagggatcgcagctgcagggagggccagggaggttgggggtgggagtgaatgctaaaagcagatcgtccagtgcccttttcagtgctaccggcctctcaccaagcagtcctccatgtgagcaaccccgagacaaaaatgctaagtgggatcaagagagcagcactcggagagggtgtttgccagtctgagtgtcccgcggtgcccgccaacccgcttcctgactgacctgagcaaggtcttactaagcagtcccatctctgtgggaggcatgcaacgcgtgcagggagttcaggtgccggtcggcgtagccaggcctggaggccccccaggcaggaggccgcccaaaggcggggccggcgtctcgcagactaggggctgggggcggccacagacggcctcgaaaccacagcccttaccccaatcccacgagccccgccaacgaaccacaggtgctgggctttagagaacatgggaaggcggccccagacctggcgggaacgcctttccctcagagccaggccccggccccgtctgggaagctcatcttgcgaagctgagggagctcagggcaaaggccaggctagcgcggaccggaaggggccgaggctgcacgggcctctgccagaacgctcaggacatcccggcctgggtttacaacgctgttaggaaaattaaccaatgaataaagcaacgttcagtgcgca

SEQ ID NO: 267 - protein, 403 aa, Homo sapiens
MSGRVGDLSPRQKEALAKFRENVQDVLPALPNPDDYFLLRWLRARSFDLQKSEAMLRKHVEFRKQKDIDNIISWQPPEVIQQYLSGGMCGYDLDGCPVWYDIIGPLDAKGLLFSASKQDLLRTKMRECELLLQECAHQTTKLGRKVETITIIYDCEGLGLKHLWKPAVEAYGEFLCMFEENYPETLKRLFVVKAPKLFPVAYNLIKPFLSEDTRKKIMVLGANWKEVLLKHISPDQVPVEYGGTMTDPDGNPKCKSKINYGGDIPRKYYVRDQVKQQYEHSVQISRGSSHQVEYEILFPGCVLRWQFMSDGADVGFGIFLKTKMGERQRAGEMTEVLPNQRYNSHLVPEDGTLTCSDPGIYVLRFDNTYSFIHAKKVNFTVEVLLPDKASEEKMKQLGAGTPK

SEQ ID NO: 268 - DNA, 1464 bp, Homo sapiens
gtggggacagccgagccgcgccgggcccctggacggcgtcgccaaggagctgggatcgcacttgctgcagactttggatggatttgtttttgtggtagcatctgatggcaaaatcatgtatatatccgagaccgcttctgtccatttaggcttatcccaggtggagctcacgggcaacagtatttatgaatacatccatccttctgaccacgatgagatgaccgctgtcctcacggcccaccagccgctgcaccaccacctgctccaaggtatgagatagagaggtcgttctttcttcgaatgaaatgtgtcttggcgaaaaggaacgcgggcctgacctgcagcggatacaaggtcatccactgcagtggctacttgaagatcaggcagtatatgctggacatgtccctgtacgactcctgctaccagattgtggggctggtggccgtgggccagtcgctgccacccagtgccatcaccgagatcaagctgtacagtaacatgttcatgttcagggccagccttgacctgaagctgatattcctggattccagggtgaccgaggtgacggggtacgagccgcaggacctgatcgagaagaccctataccatcacgtgcacggctgcgacgtgttccacctccgctacgcacaccacctcctgttggtgaagggccaggtcaccaccaagtactaccggctgctgtccaagcggggcggctgggtgtgggtgcagagctacgccaccgtggtgcacaacagccgctcgtcccggccccactgcatcgtgagtgtcaattatgtactcacggagattgaatacaaggaacttcagctgtccctggagcaggtgtccactgccaagtcccaggactcctggaggaccgccttgtctacctcacaagaaactaggaaattagtgaaacccaaaaataccaagatgaagacaaagctgagaacaaacccttaccccccacagcaatacagctcgttccaaatggacaaactggaatgcggccagctcggaaactggagagccagtccccctgcaagcgctgctgctcctccagaactgcagccccactcagaaagcagtgaccttctgtacacgccatcctacagcctgcccttctcctaccattacggacacttccctctggactctcacgtcttcagcagcaaaaagccaatgttgccggccaagttcgggcagccccaaggatccccttgtgaggtggcacgctttttcctgagcacactgccagccagcggtgaatgccagtggcattatgccaaccccctagtgcctagcagctcgtctccagctaaaaatcctccagagccaccggcgaacactgctaggcacagcctggtgccaagctacgaaggcaagcagatgtcctctgcggagataccgccagctccccaggacgcagactgactcctgtttgctcgctggaccaac

SEQ ID NO: 269 - protein, 667 aa, Homo sapiens; identical to SEQ ID NO: 110

SEQ ID NO: 270 - DNA, 1192 bp, Homo sapiens
  modified_base (1122)..(1122): a, c, g, t, unknown or other
ggcacgaggagaagatgtggcttgctcatgcttgacttctgccatggttgtgaggcctccccagccatgtggaactgttttcaggtgctggttccatggctcttcctgagccgaaaataaggaaactccatagaccttgtccactggaactcgttcccatctaccctccactctatccagggtgatggatctctgcagtaagtggaagagttcttcatggcccccaaggttatatccatctagaacttcagcacgtaatttcatctggaaatagtgcctttgtggatataagttaggtaaaactgaagatgagatcatactggattaggatgggatctaaatccaatgaaaatgtcttcataaaaaacaggaaagaacccatagaaacacaaggaagaaggtcatgtgaagatggaggcagagattggagggatgcagccaccggcccaggaatgccagcagccacccagaagctggaaggaaatgagggattctctcctagaacctttagagagracatggtcctgtgaacagcttgattttggacttgcccatagcttgtatactcttactttggatacaattttatccaaacttggctaaacagtttctcagcctatggaaaatttaaaatggagaagattcaactcgattcttacagattcaaagcaagaaaatgatgggaacataggaggagaccaagaaagcctataaaaagcaaaaatatgaagtgaacattgtggtagctttaagatgtttagtgtagctgcaggcaccctatacacatgaaaacccccaaggggaatccccatatcacagtgtagtgtgatatttgacattygtgatcatytagagatgtacagaaaaggtgaatctgtgttctgtatattctgcctaaggcaaagaaatgtttagctytctttaaaatagttccataattttttytaaaaagctttgcttgaaaactgtaagcttcccatatctggagcatttcactttaaatatttggataaatatgttatcttcttacttggacatttcatgtgtttagggattgtyttytaaattcttcctaattcatatagctgctaacacttcccgcagagctaaaccattacagantatgaaataaagaccctattgatttgaacttaaaaaaaaaaamamaaaaaaaaaaaaaaaaaaaaaatga

SEQ ID NO: 271 - DNA, 1365 bp, Homo sapiens
atggaatcaatctctatgatgggaagccctaagagccttagtgaaacttgtttacctaatggcataaatggtatcaaagatgcaaggaaggtcactgtaggtgtgattggaagtggagattttgccaaatccttgaccattcgacttattagatgcggctatcatgtggtcataggaagtagaaatcctaagtttgcttctgaattttttcctcatgtggtagatgtcactcatcatgaagatgctctcacaaaaacaaatataatatttgttgctatacacagagaacattatacctccctgtgggacctgagacatctgcttgtgggtaaaatcctgattgatgtgagcaataacatgaggataaaccagtacccagaatccaatgctgaatatttggcttcattattcccagattctttgattgtcaaaggatttaatgttgtctcagcttgggcacttcagttaggacctaaggatgccagccggcaggtttatatatgcagcaacaatattcaagcgcgacaacaggttattgaacttgcccgccagttgaatttcattcccattgacttgggatccttatcatcagccagagagattgaaaatttacccctacgactctttactctctggagagggccagtggtggtagctataagcttggccacattttttttcctttattcctttgtcagagatgtgattcatccatatgctagaaaccaacagagtgacttttacaaaattcctatagagattgtgaataaaaccttacctatagttgccattactttgctctccctagtatacctcgcaggtcttctggcagctgcttatcaactttattacggcaccaagtataggagatttccaccttggttggaaacctggttacagtgtagaaaacagcttggattactaagttttttcttcgctatggtccatgttgcctacagcctctgcttaccgatgagaaggtcagagagatatttgtttctcaacatggcttatcagcaggttcatgcaaatattgaaaactcttggaatgaggaagaagtttggagaattgaaatgtatatctcctttggcataatgagccttggcttactttccctcctggcagtcacttctatcccttcagtgagcaatgctttaaactggagagaattcagttttattcagtctacacttggatatgtcgctctgctcataagtactttccatgttttaatttatggatggaaacgagcttttgaggaagagtactacagattttatacaccaccaaactttgttcttgctcttgttttgccctcaattgtaattctggatcttttgcagctttgcagatacccagactga

SEQ ID NO: 272 - protein, 454 aa, Homo sapiens
MESISMMGSPKSLSETCLPNGINGIKDARKVTVGVIGSGDFAKSLTIRLIRCGYHVVIGSRNPKFASEFFPHVVDVTHHEDALTKTNIIFVAIHREHYTSLWDLRHLLVGKILIDVSNNMRINQYPESNAEYLASLFPDSLIVKGFNVVSAWALQLGPKDASRQVYICSNNIQARQQVIELARQLNFIPIDLGSLSSAREIENLPLRLFTLWRGPVVVAISLATFFFLYSFVRDVIHPYARNQQSDFYKIPIEIVNKTLPIVAITLLSLVYLAGLLAAAYQLYYGTKYRRFPPWLETWLQCRKQLGLLSFFFAMVHVAYSLCLPMRRSERYLFLNMAYQQVHANIENSWNEEEVWRIEMYISFGIMSLGLLSLLAVTSIPSVSNALNWREFSFIQSTLGYVALLISTFHVLIYGWKRAFEEEYYRFYTPPNFVLALVLPSIVILDLLQLCRYPD

SEQ ID NO: 273 - DNA, 1933 bp, Homo sapiens
ccgccgccttctactccgccgcgggggtcgcagcggctgccgcgccgtcctcgagtttccagcgtgaggaggaggctgagggcggagaggcgcatcgtgttcgaggcggagaccgagggggagccccgcgcgcggcgtcgctcattgctatggacagtgctatcaccctgtggcagttccttcttcagctcctgcagaagcctcagaacaagcacatgatctgttggacctctaatgatgggcagtttaagcttttgcaggcagaagaggtggctcgtctctgggggattcgcaagaacaagcctaacatgaattatgacaaactcagccgagccctcagatactattatgtaaagaatatcatcaaaaaagtgaatggtcagaagtttgtgtacaagtttgtctcttatccagagattttgaacatggatccaatgacagtgggcaggattgagggtgactgtgaaagtttaaacttcagtgaagtcagcagcagttccaaagatgtggagaatggagggaaagataaaccacctcagcctggtgccaagacctctagccgcaatgactacatacactctggcttatattcttcatttactctcaactctttgaactcctccaatgtaaagcttttcaaattgataaagactgagaatccagccgagaaactggcagagaaaaaatctcctcaggagcccacaccatctgtcatcaaatttgtcacgacaccttccaaaaagccaccagttgaacctgttgctgccaccatttcaattggcccaagtatttctccatcttcagaagaaactatccaagctttggagacattggtttccccaaaactgccttccctggaagccccaacctctgcctctaacgtaatgactgcttttgccaccacaccacccatttcgtccataccccctttgcaggaacctcccagaacaccttcaccaccactgagttctcacccagacatcgacacagacattgattcagtggcttctcagccaatggaacttccagagaatttgtctctggagcctaaagaccaggattcagtcttgctagaaaaggacaaagtaaataattcatcaagatccaagaaacccaaagggttaggactggcacccacccttgtgatcacgagcagtgatccaagcccactgggaatactgagcccatctctccctacagcttctcttacaccagcatttttttcacagacacccatcatactgactccaagccccttgctctccagtatccacttctggagtactctcagtcctgttgctcccctaagtccagccagactgcaaggtgctaacacacttttccagtttccttctgtactgaacagtcatgggccattcactctgtctgggctggatggaccttccacccctggcccattttccccagacctacagaagacataacctatgcacttgtggaatgagagaaccgaggaacgaagaaacagacattcaacatgattgcatttgaagtgagcaattgatagttctacaatgctgataatagactattgtgatttttgccattccccattgaaaacatctttttaggattctctttgaataggactcaagttggactatatgtataaaaatgccttaattggagtctaaactccacctccctctgtcttttccttttctttttctttccttccttccttttcttttctcctttaaaaatattttgagctttgtgctgaagaagtttttggtgggctttagtgactgtgctttgcaaaagcaattaagaacaaagttactccttctggctattgggaccctttggccaggaaaaattatgcttagaatctattatttaaagaagtatttgtgaaatgaaaaaaaaaaaaaaaaaaaaaaaaaaaaaaaaaaaaaaaaaaaaaaaaaaa

SEQ ID NO: 274 - protein, 431 aa, Homo sapiens
MDSAITLWQFLLQLLQKPQNKHMICWTSNDGQFKLLQAEEVARLWGIRKNKPNMNYDKLSRALRYYYVKNIIKKVNGQKFVYKFVSYPEILNMDPMTVGRIEGDCESLNFSEVSSSSKDVENGGKDKPPQPGAKTSSRNDYIHSGLYSSFTLNSLNSSNVKLFKLIKTENPAEKLAEKKSPQEPTPSVIKFVTTPSKKPPVEPVAATISIGPSISPSSEETIQALETLVSPKLPSLEAPTSASNVMTAFATTPPISSIPPLQEPPRTPSPPLSSHPDIDTDIDSVASQPMELPENLSLEPKDQDSVLLEKDKVNNSSRSKKPKGLGLAPTLVITSSDPSPLGILSPSLPTASLTPAFFSQTPIILTPSPLLSSIHFWSTLSPVAPLSPARLQGANTLFQFPSVLNSHGPFTLSGLDGPSTPGPFSPDLQKT

SEQ ID NO: 275 - DNA, 3060 bp, Homo sapiens
aatcaggaacagatcatatattgaccgagattctgagtatctcttgcaagaaaatgaaccagatggaactttagaccaaaaattattggaagatttacaaaagaaaaaaaatgaccttcggtatattgaaatgcagcatttcagagaaaagctgccttcgtatggaatgcaaaaggaattggtaaatttaattgataaccatcaggtaacagtaataagtggtgaaactggttgtggcaaaaccactcaagttactcagttcattttggataactacattgaaagaggaaaaggatctgcttgcagaatagtttgtactcagccaagaagaattagtgccatttcagttgcggaaagagtagctgcagaaagggcagaatcttgtggcagtggtaatagtactggatatcaaattcgtctccagagtcggttgccaaggaaacagggttctatcttatactgtacaacaggaatcatccttcagtggctccagtcagacccgtatttgtccagtgttagtcatatcgtacttgatgaaatccatgaaagaaatctgcagtcagatgttttaatgactgttgttaaagaccttctcaattttcgatctgacttgaaagtaatattgatgagtgcaacattgaatgcagaaaagttttcagaatattttggtaactgtccaatgatacatatacctggttttacctttccggttgtggaatatcttttggaagatgtaattgaaaaaataaggtatgttccagaacaaaaagaacacagatcccagtttaagaggggtttcatgcaagggcatgtaaatagacaagaaaaagaagaaaaagaagcaatatataaagaacgttggccagattatgtaagggaactgcgaagaaggtattctgcaagtactgtagatgttatagaaatgatggaggatgataaagttgatctgaatttgattgttgccctcatccgatacattgttttggaagaagaggatggtgcgatactggtctttctgccaggctgggacaatatcagcactttacatgatctcttgatgtcacaagtaatgtttaaatcagataaatttttaattatacctttacattcactgatgcctacagttaaccagacacaggtgtttaaaagaacccctcctggtgttcggaaaatagtaattgctaccaacattgcggagactagcattaccatagatgatgtcgtttatgtgatagatggaggaaaaataaaagagacgcattttgatactcagaacaatatcagtacaatgtccgctgagtgggttagtaaagctaatgccaaacagagaaaaggtcgagctggaagagttcaacctggtcattgctatcatctgtataatggtcttagagcaagtcttctagatgactatcaactgccagaaattttgagaactcctttggaagaactttgtttacaaataaagattttaaggctaggtggaattgcttattttctgagtagattaatggacccaccatcaaatgaggcagtgttactctccataagacacctgatggagctgaacgctttggataaacaagaagaattgacacctcttggagtccacttggcacgattacccgttgagccacatattggaaaaatgattctttttggagcactgttctgctgcttagacccagtactcactattgctgctagtctcagtttcaaagatccatttgtcattccactgggaaaagaaaagattgcagatgcaagaagaaaggaattggcaaaggatactagaagtgatcacttaacagttgtgaatgcgtttgagggctgggaagaggctaggcgacgtggtttcagatacgaaaaggactattgctgggaatattttctgtcttcaaacacactgcagatgctgcataacatgaaaggacagtttgctgagcatcttcttggagctggatttgtaagcagtagaaatcctaaagatccagaatctaatataaattcagataatgagaagataattaaagctgtcatctgtgctggtttatatcccaaagttgctaaaattcgactaaatttgggtaaaaaaagaaaaatggtaaaagtttacacaaaaaccgatggcctggttgctgttcatcctaaatctgttaatgtggagcaaacagactttcactacaactggcttatctatcacctaaagatgagaacaagcagtatatacttgtatgactgcacagaggtttccccatactgtctcttgttttttggaggtgacatttccatccagaaggataacgatcaggaaactattgctgtagatgagtggattgtatttcagtctccagcaagaattgcccatcttgttaaggaattaagaaaggaactagatattcttctgcaagagaagattgaaagtcctcatcctgtagactggaatgacactaaatccagagactgtgcagtactgtcagctattatagacttgatcaaaacacaggaaaaggcaactcccaggaactttccgccacgattccaggatggatattacagctgacagcttttcaggggtggtctgaaaagccagtttgacagccattcttcatcattgtttaaattttggctggatgccaaaccctgggacatgaacaattttcatgtgtaaggtagaagccttcagtaggtagtaaagacttaatgtgcatgacttgatgttatatgtagagatatatatatatatatatataccataaaagcaatatgttctctgatcatatactctgctgtggtcatgcccactctttgggagtatattccctttatatatattgagtattgtaccacttgagaaattcctttgttctgttatacaaaattaatctttctgctcataatgattgatgataccaccagtaaaaataggatgtttaccccaaaacaagtgtcaattaagaatttgaacacaaccacattttttaaaatgaaacttctatcggaagtaaattaatttgttgtaataaagtccagtatttaataaaatgtacaatgttaaatctc

SEQ ID NO: 276 - protein, 852 aa, Homo sapiens
IRNRSYIDRDSEYLLQENEPDGTLDQKLLEDLQKKKNDLRYIEMQHFREKLPSYGMQKELVNLIDNHQVTVISGETGCGKTTQVTQFILDNYIERGKGSACRIVCTQPRRISAISVAERVAAERAESCGSGNSTGYQIRLQSRLPRKQGSILYCTTGIILQWLQSDPYLSSVSHIVLDEIHERNLQSDVLMTVVKDLLNFRSDLKVILMSATLNAEKFSEYFGNCPMIHIPGFTFPVVEYLLEDVIEKIRYVPEQKEHRSQFKRGFMQGHVNRQEKEEKEAIYKERWPDYVRELRRRYSASTVDVIEMMEDDKVDLNLIVALIRYIVLEEEDGAILVFLPGWDNISTLHDLLMSQVMFKSDKFLIIPLHSLMPTVNQTQVFKRTPPGVRKIVIATNIAETSITIDDVVYVIDGGKIKETHFDTQNNISTMSAEWVSKANAKQRKGRAGRVQPGHCYHLYNGLRASLLDDYQLPEILRTPLEELCLQIKILRLGGIAYFLSRLMDPPSNEAVLLSIRHLMELNALDKQEELTPLGVHLARLPVEPHIGKMILFGALFCCLDPVLTIAASLSFKDPFVIPLGKEKIADARRKELAKDTRSDHLTVVNAFEGWEEARRRGFRYEKDYCWEYFLSSNTLQMLHNMKGQFAEHLLGAGFVSSRNPKDPESNINSDNEKIIKAVICAGLYPKVAKIRLNLGKKRKMVKVYTKTDGLVAVHPKSVNVEQTDFHYNWLIYHLKMRTSSIYLYDCTEVSPYCLLFFGGDISIQKDNDQETIAVDEWIVFQSPARIAHLVKELRKELDILLQEKIESPHPVDWNDTKSRDCAVLSAIIDLIKTQEKATPRNFPPRFQDGYYS

SEQ ID NO: 277 - DNA, 1671 bp, Homo sapiens
gattttatcctggaacattacagtgaagatggctatttatatgaagatgaaattgcagatcttatggatctgagacaagcttgtcggacgcctagccgggatgaggccggggtggaactgctgatgacatacttcatccagctgggctttgtcgagagtcgattcttcccgcccacacggcagatgggactcctgttcacctggtatgactctctcaccggggttccggtcagccagcagaacctgctgctggagaaggccagtgtcctgttcaacactggggccctctacacccagattgggacccggtgtgatcggcagacgcaggctgggctggagagtgccatagatgcctttcagagagccgcaggggttttaaattacctgaaagacacatttacccatactccaagttacgacatgagccctgccatgctcagcgtgctcgtcaaaatgatgcttgcacaagcccaagaaagcgtgtttgagaaaatcagccttcctgggatccggaatgaattcttcatgctggtgaaggtggctcaggaggctgctaaggtgggagaggtctaccaacagctacacgcagccatgagccaggcgccggtgaaagagaacatcccctactcctgggccagcttagcctgcgtgaaggcccaccactacgcggccctggcccactacttcactgccatcctcctcatcgaccaccaggtgaagccaggcacggatctggaccaccaggagaagtgcctgtcccagctctacgaccacatgccagaggggctgacacccttggccacactgaagaatgatcagcagcgccgacagctggggaagtcccacttgcgcagagccatggctcatcacgaggagtcggtgcgggaggccagcctctgcaagaagctgcggagcattgaggtgctacagaaggtgctgtgtgccgcacaggaacgctcccggctcacgtacgcccagcaccaggaggaggatgacctgctgaacctgatcgacgcccccagtgttgttgctaaaactgagcaagaggttgacattatattgccccagttctccaagctgacagtcacggacttcttccagaagctgggccccttatctgtgttttcggctaacaagcggtggacgcctcctcgaagcatccgcttcactgcagaagaaggggacttggggttcaccttgagagggaacgcccccgttcaggttcacttcctggatccttactgctctgcctcggtggcaggagcccgggaaggagattatattgtctccattcagcttgtggattgtaagtggctgacgctgagtgaggttatgaagctgctgaagagctttggcgaggacgagatcgagatgaaagtcgtgagcctcctggactccacatcatccatgcataataagagtgccacatactccgtgggaatgcagaaaacgtactccatgatctgcttagccattgatgatgacgacaaaactgataaaaccaagaaaatctccaagaagctttccttcctgagttggggcaccaacaagaacagacagaagtcagccagcaccttgtgcctcccatcggtcggggctgcacggcctcaggtcaagaagaagctgccctcccctttcagccttctcaactcagacagttcttggtactaa

SEQ ID NO: 278 - protein, 556 aa, Homo sapiens
DFILEHYSEDGYLYEDEIADLMDLRQACRTPSRDEAGVELLMTYFIQLGFVESRFFPPTRQMGLLFTWYDSLTGVPVSQQNLLLEKASVLFNTGALYTQIGTRCDRQTQAGLESAIDAFQRAAGVLNYLKDTFTHTPSYDMSPAMLSVLVKMMLAQAQESVFEKISLPGIRNEFFMLVKVAQEAAKVGEVYQQLHAAMSQAPVKENIPYSWASLACVKAHHYAALAHYFTAILLIDHQVKPGTDLDHQEKCLSQLYDHMPEGLTPLATLKNDQQRRQLGKSHLRRAMAHHEESVREASLCKKLRSIEVLQKVLCAAQERSRLTYAQHQEEDDLLNLIDAPSVVAKTEQEVDIILPQFSKLTVTDFFQKLGPLSVFSANKRWTPPRSIRFTAEEGDLGFTLRGNAPVQVHFLDPYCSASVAGAREGDYIVSIQLVDCKWLTLSEVMKLLKSFGEDEIEMKVVSLLDSTSSMHNKSATYSVGMQKTYSMICLAIDDDDKTDKTKKISKKLSFLSWGTNKNRQKSASTLCLPSVGAARPQVKKKLPSPFSLLNSDSSWY

SEQ ID NO: 279 - DNA, 2674 bp, Homo sapiens
gaattcggcacgagccttgttggaggttctggggcgcagaaccgctactgctgcttcggtctctccttgggaaaaaataaaatttgaaccttttggagctgtgtgctaaatcttcagtgggacaatgggttcagacaaaagagtgagtagaacagagcgtagtggaagatacggttccatcatagacagggatgaccgtgatgagcgtgaatcccgaagcaggcggagggactcagattacaaaagatctagtgatgatcggaggggtgatagatatgatgactaccgagactatgacagtccagagagagagcgtgaaagaaggaacagtgaccgatccgaagatggctaccattcagatggtgactatggtgagcacgactataggcatgacatcagtgacgagagggagagcaagaccatcatgctgcgcggccttcccatcaccatcacagagagcgatattcgagaaatgatggagtccttcgaaggccctcagcctgcggatgtgaggctgatgaagaggaaaacaggtgagagcttgcttagttcctgatattattgttctcttccccattcccacctcagtccctaaagaacatcctgattcccccagtcttcaagcacatgaattcagaatgaaaggtttgccatggctaaggaatgtgactctttgaaaaccatgttagcatctgaggaacttttttaaactttgttttagggacttttttttccttaggtaagtaatgatttataaactcctttttttttttgactatagtcggttgcatggttactttaagcgtggaatcaaatggagtggcatttagttcaggcggcttgttccttgccatggcaaagtatcaagaagatccccaagtcaagtcacatttgtaaagctgcttcccaattggctttgtcacgcagtgttgaagcagtgggagagagattcacctgttataaaggaactgactaacacaagtatcccgtctatatctgaatgctgtctctaggtgtaagccgtggtttcgccttcgtggagttttatcacttgcaagatgctaccagctggatggaagccaatcaggttgcttcactcaccaagtctagatattcatgaaaatggaacaagtctgtacaattttaaaaaaaggttgaaggagtggtttgttccaaaggagtgacttttttttaaaaaaaaagctttgtatatattaaaattgatgttactagaataagtacagtaccaaggacttcattatagaatttgttctgcctttaaacatggctacctacctggcagggctttgttaactactgaatacctgtctggtaatcactaaaacatctttatgtttcccttttttctagtttgttatattcctattatgtccattgagagtaagcttagtatatcaaactctccatttgacagtgaagagaacatagtgaaagtctgtggcggcatttttataagtaattccttatttctgcctgaagaccacaaagcctcctggaggcgtaactgctcagaccggtcttcagggaatatttaaggacttagtggaatttatgaacaataagtctgatgagattagcctgggagtggtgtcctgcagctgtctaatctagagtggcattaacattctaatctccttgagaatgccttttatagtctgttcaaagcaagtcattgatggttcttcgaggtagtgttaactgaagtgttcttcagtttgtcaagataatgttcagtgcttggcacttaaataacattttttgcaagaactccaaggcacattattgaatgcctttaaccaagtgcattctgggaagtttgcttgactcattatcttgcttttctgcagcattctgtgatttgagtcatccatgaatccatgaataaaagttacattctttgattggtaatattgccatttataacaagactcactaatgagggtatcactttgactgactgatttgttaaagtttttaagcctctcattttcctaacccagaaatcacagcctgattttattaaaagtagagcttcattcatttcataccatagataccatcctagtaaatccagaacatatacaaggttcatgtgagtctgctttcttgacatgatagcattgtttgatgcagtggatatgtcagaatgactaacctaggagtttgaaactcctaagaaactaaaacctgtaagacatttaaaagtctccacaattttaatgtatacaaagctatgttactgtgtaacacattacagttcaaattcactccagaaataaaaggccagtaggattagggactcactggtagtttggagtctcccagcacacatccctcctagtgggatgatctattcacatatctcccagcttttttatttttgcttctgtatatcacagtgagtggatggcccttcagctttttctctcctggccagacatgcagtcttgcctttagatatcgcagagacaaaattcacagcatgtcttaaatcttccaggatttgcaagaaccaaattgctcaacagtatgtatgtttagaggggttagactcctttttaaaatctggatatctaaccacctacttaaatctgtttgatagtgtcaaaccacccccacccttgatcctcccacccccaaaaaaaaaaaaaaa

SEQ ID NO: 280 - protein, 143 aa, Homo sapiens
MGSDKRVSRTERSGRYGSIIDRDDRDERESRSRRRDSDYKRSSDDRRGDRYDDYRDYDSPERERERRNSDRSEDGYHSDGDYGEHDYRHDISDERESKTIMLRGLPITITESDIREMMESFEGPQPADVRLMKRKTGESLLSS

SEQ ID NO: 281 - DNA, 4000 bp, Homo sapiens
cggccgcttttttctcaagatggcagattcccactgaggctgagggggccgagctcgcgcgccgcgttcccttctccgttgccatgaaccgcggacaccccggccccgatggcccccgtgtacgaaggtatggcctcacatgtgcaagttttctcccctcacacccttcaatcaagtgccttctgtagtgtgaagaaactaaaagtagagccaagttccaactgggacatgactgggtacggctcccacagcaaagtgtacagccagagcaagaacataccaccttctcagccagcctccacaaccgtcagcacctccttgccggtcccaaacccaagcctaccttacgagcagaccatcgtcttcccaggaagcaccgggcacatcgtggtcacctcagcaagcagcacttctgtcaccgggcaagtcctcggcggaccacacaacctaatgcgtcgaagcactgtgagcctccttgatacctaccaaaaatgtggactcaagcgtaagagcgaggagatcgagaacacaagcagcgtgcagatcatcgaggagcatccacccatgattcagaataatgcaagcggggccactgtcgccactgccaccacgtctactgccacctccaaaaacagcggctccaacagcgagggcgactatcagctggtgcagcatgaggtgctgtgctccatgaccaacacctacgaggtcttagagttcttgggccgagggacgtttggacaagtggtcaagtgctggaaacggggcaccaatgagatcgtagccatcaagatcctgaagaaccgcccatcctatgcccgacaaggtcagattgaagtgagcatcctggcccggttgagcacggagagtgccgatgactataacttcgtccgggcctacgaatgcttccagcacaagaaccacacgtgcttggtcttcgagatgttggagcagaacctctatgactttctgaagcaaaacaagtttagccccttgcccctcaaatacattcgcccagttctccagcaggtagccacagccctgatgaaactcaaaagcctaggtcttatccacgctgacctcaaaccagaaaacatcatgctggtggatccatctagacaaccatacagagtcaaggtcatcgactttggttcagccagccacgtctccaaggctgtgtgctccacctacttgcagtccagatattacagggcccctgagatcatccttggtttaccattttgtgaggcaattgacatgtggtccctgggctgtgttattgcagaattgttcctgggttggccgttatatccaggagcttcggagtatgatcagattcggtatatttcacaaacacagggtttgcctgctgaatatttattaagcgccgggacaaagacaactaggtttttcaaccgtgacacggactcaccatatcctttgtggagactgaagacaccagatgaccatgaagcagagacagggattaagtcaaaagaagcaagaaagtacattttcaactgtttagatgatatggcccaggtgaacatgacgacagatttggaagggagcgacatgttggtagaaaaggctgaccggcgggagttcattgacctgttgaagaagatgctgaccattgatgctgacaagagaatcactccaatcgaaaccctgaaccatccctttgtcaccatgacacacttactcgattttccccacagcacacacgtcaaatcatgtttccagaacatggagatctgcaagcgtcgggtgaatatgtatgacacggtgaaccagagcaaaacccctttcatcacgcacgtggcccccagcacgtccaccaacctgaccatgacctttaacaaccagctgaccactgtccacaaccaggctccctcctctaccagtgccactatttccttagccaatcccgaagtctccatactaaactacccatctacactctaccagccctcagcggcatccatggctgcagtggcccagcggagcatgcccctgcagacaggaacagcccagatttgtgcccggcctgacccgttccagcaagctctcatcgtgtgtccccccggcttccaaggcttgcaggcctctccctctaagcacgctggctactcggtgcgaatggaaaatgcagttcccatcgtcactcaagccccaggagctcagcctcttcagatccaaccaggtctgcttgcccagcaggcttggccaagtgggacccagcagatcctgcttcccccagcatggcagcaactgactggagtggccacccacacatcagtgcagcatgccaccgtgattcccgagaccatggcaggcacccagcagctggcggactggagaaatacgcatgctcacggaagccattataatcccatcatgcagcagcctgcactattgaccggtcatgtgacccttccagcagcacagcccttaaatgtgggtgtggcccacgtgatgcggcagcagccaaccagcaccacctcctcccggaagagtaagcagcaccagtcatctgtgagaaatgtctccacctgtgaggtgtcctcctctcaggccatcagctccccacagcgatccaagcgtgtcaaggagaacacacctccccgctgtgccatggtgcacagtagcccggcctgcagcacctcggtcacctgtgggtggggcgacgtggcctccagcaccacccgggaacggcagcggcagacaattgtcattcccgacactcccagccccacggtcagcgtcatcaccatcagcagtgacacggacgaggaggaggaacagaaacacgcccccaccagcactgtctccaagcaaagaaaaaacgtcatcagctgtgtcacagtccacgactccccctactccgactcctccagcaacaccagcccctactccgtgcagcagcgtgctgggcacaacaatgccaatgcctttgacaccaaggggagcctggagaatcactgcacggggaacccccgaaccatcatcgtgccacccctgaaaacccaggccagcgaagtattggtggagtgtgatagcctggtgccagtcaacaccagtcaccactcgtcctcctacaagtccaagtcctccagcaacgtgacctccaccagcggtcactcttcagggagctcatctggagccatcacctaccggcagcagcggccgggcccccacttccagcagcagcagccactcaatctcagccaggctcagcagcacatcaccacggaccgcactgggagccaccgaaggcagcaggcctacatcactcccaccatggcccaggctccgtactccttcccgcacaacagccccagccacggcactgtgcacccgcatctggctgcagccgctgccgctgcccacctccccacccagccccacctctacacctacactgcgccggcggccctgggctccaccggcaccgtggcccacctggtggcctcgcaaggctctgcgcgccacaccgtgcagcacactgcctacccagccagcatcgtccaccaggtccccgtgagcatgggcccccgggtcctgccctcgcccaccatccacccgagtcagtatccagcccaatttgcccaccagacctacatcagcgcctcgccagcctccaccgtctacactggatacccactgagccccgccaaggtcaaccagtacccttacatataaacactggaggggagggagggagggagggagggagagaatggcccgagggaggagggagagaaggagggaggcgctcctgggaccgtgggcgctggccttttatactgaagatgccgcacacaaacaatgcaaacggggcaggggcggggggggggggggcagagggcagggggacgggtcgggacaccagtgaaacttgaaccgggaagtgggaggacgtagagcagagaagagaacatttttaaaaggaagggattaaagagggtgggaaatctatggtttttattttaaaaaa

SEQ ID NO: 282 - protein, 1198 aa, Homo sapiens
MAPVYEGMASHVQVFSPHTLQSSAFCSVKKLKVEPSSNWDMTGYGSHSKVYSQSKNIPPSQPASTTVSTSLPVPNPSLPYEQTIVFPGSTGHIVVTSASSTSVTGQVLGGPHNLMRRSTVSLLDTYQKCGLKRKSEEIENTSSVQIIEEHPPMIQNNASGATVATATTSTATSKNSGSNSEGDYQLVQHEVLCSMTNTYEVLEFLGRGTFGQVVKCWKRGTNEIVAIKILKNRPSYARQGQIEVSILARLSTESADDYNFVRAYECFQHKNHTCLVFEMLEQNLYDFLKQNKFSPLPLKYIRPVLQQVATALMKLKSLGLIHADLKPENIMLVDPSRQPYRVKVIDFGSASHVSKAVCSTYLQSRYYRAPEIILGLPFCEAIDMWSLGCVIAELFLGWPLYPGASEYDQIRYISQTQGLPAEYLLSAGTKTTRFFNRDTDSPYPLWRLKTPDDHEAETGIKSKEARKYIFNCLDDMAQVNMTTDLEGSDMLVEKADRREFIDLLKKMLTIDADKRITPIETLNHPFVTMTHLLDFPHSTHVKSCFQNMEICKRRVNMYDTVNQSKTPFITHVAPSTSTNLTMTFNNQLTTVHNQAPSSTSATISLANPEVSILNYPSTLYQPSAASMAAVAQRSMPLQTGTAQICARPDPFQQALIVCPPGFQGLQASPSKHAGYSVRMENAVPIVTQAPGAQPLQIQPGLLAQQAWPSGTQQILLPPAWQQLTGVATHTSVQHATVIPETMAGTQQLADWRNTHAHGSHYNPIMQQPALLTGHVTLPAAQPLNVGVAHVMRQQPTSTTSSRKSKQHQSSVRNVSTCEVSSSQAISSPQRSKRVKENTPPRCAMVHSSPACSTSVTCGWGDVASSTTRERQRQTIVIPDTPSPTVSVITISSDTDEEEEQKHAPTSTVSKQRKNVISCVTVHDSPYSDSSSNTSPYSVQQRAGHNNANAFDTKGSLENHCTGNPRTIIVPPLKTQASEVLVECDSLVPVNTSHHSSSYKSKSSSNVTSTSGHSSGSSSGAITYRQQRPGPHFQQQQPLNLSQAQQHITTDRTGSHRRQQAYITPTMAQAPYSFPHNSPSHGTVHPHLAAAAAAAHLPTQPHLYTYTAPAALGSTGTVAHLVASQGSARHTVQHTAYPASIVHQVPVSMGPRVLPSPTIHPSQYPAQFAHQTYISASPASTVYTGYPLSPAKVNQYPYI

SEQ ID NO: 283 - DNA, 1464 bp, Homo sapiens
agtcacagccaggtaaccctggagtgaagcggtttagttagaagggagcagataaactcgtcactctagtagctttaaccctcaccctgaggcaccttagcaatcagccattgcctgcaagcctccaaagcttgtctttgcctaatatggagcccaaagaagccactgggaaagaaaacatggtcaccaagaaaaagaatctggccttcttgaggtctagactctatatgctggagagaaggaagactgacactgtggttgagagcagtgtttctggggaccactctggcaccttgaggaggagccaatctgacaggaccgaatacaaccagaaattacaagaaaagatgactccacagggtgagtgttctgtagctgagaccttaaccccagaggaagagcatcatatgaagaggatgatggcaaagcgggaaaagatcattaaggagctgatacagacagaaaaggattatctcaatgatctagagctgtgtgttagggaagtggttcagcccctgagaaataaaaagactgataggctggatgtggatagcttgtttagcaacattgagtccgtgcatcagatatcagccaagctgctgtcattgttggaagaggccacaacagacgtggaaccggccatgcaagtaattggagaagtattcttgcagattaaagggccactggaagatatttataaaatctactgctatcaccatgatgaagcacatagtatactggagtcctatgaaaaggaagaagagctgaaggaacatttgagccactgtatccagtccttaaagtaaggccttttcaaatgatgattcccatctcctctcagttgcctagcagggaacattttaaatggatgtagatgaaaggtctcacataaatcctatgttttatgagacttgctgggagctctgctttgcattccctttataaaaagctgacatgccagaagccctgattgactttttttccccctgcgagaatgactaaaaataacatggaagaagatttagagctctgcagcgattgaaaaatgcaatatcaaaatataaaatgtggaagaaaagcctcttcttaaagctattgtaacttgcctggccccacgtagttcaaggattatgtgagataacacgtggccccatgaccactggagcacatgggttaatggagttaggggaatggcctacaactctgcatggccgtcttctttccccaaactcactgtggggagatgggtgaagacaagtcaggccttgttaaagttagtttcagaacaattactcatgccttcctttctcatccctaaaacattggtgggggagctacacaatgtactttttcttttctagaggaagtatctattcactgtgaaaatctgaaaaatataacaaagtatgtgtaagataaaaaccccttgctatttcaaaaaaaaaaaaaaaaaaaaaaaaaaaa

SEQ ID NO: 284 - protein, 219 aa, Homo sapiens; identical to SEQ ID NO: 263

SEQ ID NO: 285 - DNA, 3004 bp, Homo sapiens; identical to SEQ ID NO: 157

SEQ ID NO: 286 - protein, 690 aa, Homo sapiens
MFCTKLKDLKITGECPFSLLAPGQVPNESSEEAAGSSESCKATVPICQDIPEKNIQESLPQRKTSRSRVYLHTLAESICKLIFPEFERLNVALQRTLAKHKIKESRKSLEREDFEKTIAEQAVAAGVPVEVIKESLGEEVFKICYEEDENILGVVGGTLKDFLNSFSTLLKQSSHCQEAGKRGRLEDASILCLDKEDDFLHVYYFFPKRTTSLILPGIIKAAAHVLYETEVEVSLMPPCFHNDCSEFVNQPYLLYSVHMKSTKPSLSPSKPQSSLVIPTSLFCKTFPFHFMFDKDMTILQFGNGIRRLMNRRDFQGKPNFEEYFEILTPKINQTFSGIMTMLNMQFVVRVRRWDNSVKKSSRVMDLKGQMIYIVESSAILFLGSPCVDRLEDFTGRGLYLSDIPIHNALRDVVLIGEQARAQDGLKKRLGKLKATLEQAHQALEEEKKKTVDLLCSIFPCEVAQQLWQGQVVQAKKFSNVTMLFSDIVGFTAICSQCSPLQVITMLNALYTRFDQQCGELDVYKVETIGDAYCVAGGLHKESDTHAVQIALMALKMMELSDEVMSPHGEPIKMRIGLHSGSVFAGVVGVKMPRYCLFGNNVTLANKFESCSVPRKINVSPTTYRLLKDCPGFVFTPRSREELPPNFPSEIPGICHFLDAYQQGTNSKPCFQKKDVEDGNANFLGKASGID

SEQ ID NO: 287 - DNA, 7193 bp, Homo sapiens
agaataagggcagggaccgcggctcctatctcttggtgatccccttccccattccgcccccgcctcaacgcccagcacagtgccctgcacacagtagtcgctcaataaatgttcgtggatgatgatgatgatgatgatgaaaaaaatgcagcatcaacggcagcagcaagcggaccacgcgaacgaggcaaactatgcaagaggcaccagacttcctctttctggtgaaggaccaacttctcagccgaatagctccaagcaaactgtcctgtcttggcaagctgcaatcgatgctgctagacaggccaaggctgcccaaactatgagcacctctgcacccccacctgtaggatctctctcccaaagaaaacgtcagcaatacgccaagagcaaaaaacagggtaactcgtccaacagccgacctgcccgcgcccttttctgtttatcactcaataaccccatccgaagagcctgcattagtatagtggaatggaaaccatttgacatatttatattattggctatttttgccaattgtgtggccttagctatttacatcccattccctgaagatgattctaattcaacaaatcataacttggaaaaagtagaatatgccttcctgattatttttacagtcgagacatttttgaagattatagcgtatggattattgctacatcctaatgcttatgttaggaatggatggaatttactggattttgttatagtaatagtaggattgtttagtgtaattttggaacaattaaccaaagaaacagaaggcgggaaccactcaagcggcaaatctggaggctttgatgtcaaagccctccgtgcctttcgagtgttgcgaccacttcgactagtgtcaggggtgcccagtttacaagttgtcctgaactccattataaaagccatggttcccctccttcacatagcccttttggtattatttgtaatcataatctatgctattataggattggaactttttattggaaaaatgcacaaaacatgtttttttgctgactcagatatcgtagctgaagaggacccagctccatgtgcgttctcagggaatggacgccagtgtactgccaatggcacggaatgtaggagtggctgggttggcccgaacggaggcatcaccaactttgataactttgcctttgccatgcttactgtgtttcagtgcatcaccatggagggctggacagacgtgctctactgggtaaatgatgcgataggatgggaatggccatgggtgtattttgttagtctgatcatccttggctcatttttcgtccttaacctggttcttggtgtccttagtggagaattctcaaaggaaagagagaaggcaaaagcacggggagatttccagaagctccgggagaagcagcagctggaggaggatctaaagggctacttggattggatcacccaagctgaggacatcgatccggagaatgaggaagaaggaggagaggaaggcaaacgaaatactagcatgcccaccagcgagactgagtctgtgaacacagagaacgtcagcggtgaaggcgagaaccgaggctgctgtggaagtctctggtgctggtggagacggagaggcgcggccaaggcggggccctctgggtgtcggcggtggggtcaagccatctcaaaatccaaactcagccgacgctggcgtcgctggaaccgattcaatcgcagaagatgtagggccgccgtgaagtctgtcacgttttactggctggttatcgtcctggtgtttctgaacaccttaaccatttcctctgagcactacaatcagccagattggttgacacagattcaagatattgccaacaaagtcctcttggctctgttcacctgcgagatgctggtaaaaatgtacagcttgggcctccaagcatatttcgtctctcttttcaaccggtttgattgcttcgtggtgtgtggtggaatcactgagacgatcctggtggaactggaaatcatgtctcccctggggatctctgtgtttcggtgtgtgcgcctcttaagaatcttcaaagtgaccaggcactggacttccctgagcaacttagtggcatccttattaaactccatgaagtccatcgcttcgctgttgcttctgctttttctcttcattatcatcttttccttgcttgggatgcagctgtttggcggcaagtttaattttgatgaaacgcaaaccaagcggagcacctttgacaatttccctcaagcacttctcacagtgttccagatcctgacaggcgaagactggaatgctgtgatgtacgatggcatcatggcttacgggggcccatcctcttcaggaatgatcgtctgcatctacttcatcatcctcttcatttgtggtaactatattctactgaatgtcttcttggccatcgctgtagacaatttggctgatgctgaaagtctgaacactgctcagaaagaagaagcggaagaaaaggagaggaaaaagattgccagaaaagagagcctagaaaataaaaagaacaacaaaccagaagtcaaccagatagccaacagtgacaacaaggttacaattgatgactatagagaagaggatgaagacaaggacccctatccgccttgcgatgtgccagtaggggaagaggaagaggaagaggaggaggatgaacctgaggttcctgccggaccccgtcctcgaaggatctcggagttgaacatgaaggaaaaaattgcccccatccctgaagggagcgctttcttcattcttagcaagaccaacccgatccgcgtaggctgccacaagctcatcaaccaccacatcttcaccaacctcatccttgtcttcatcatgctgagcagcgctgccctggccgcagaggaccccatccgcagccactccttccggaacacgatactgggttactttgactatgccttcacagccatctttactgttgagatcctgttgaagatgacaacttttggagctttcctccacaaaggggccttctgcaggaactacttcaatttgctggatatgctggtggttggggtgtctctggtgtcatttgggattcaatccagtgccatctccgttgtgaagattctgagggtcttaagggtcctgcgtcccctcagggccatcaacagagcaaaaggacttaagcacgtggtccagtgcgtcttcgtggccatccggaccatcggcaacatcatgatcgtcactaccctcctgcagttcatgtttgcctgtatcggggtccagttgttcaaggggaagttctatcgctgtacggatgaagccaaaagtaaccctgaagaatgcaggggacttttcatcctctacaaggatggggatgttgacagtcctgtggtccgtgaacggatctggcaaaacagtgatttcaacttcgacaacgtcctctctgctatgatggcgctcttcacagtctccacgtttgagggctggcctgcgttgctgtataaagccatcgactcgaatggagagaacatcggcccaatctacaaccaccgcgtggagatctccatcttcttcatcatctacatcatcattgtagctttcttcatgatgaacatctttgtgggctttgtcatcgttacatttcaggaacaaggagaaaaagagtataagaactgtgagctggacaaaaatcagcgtcagtgtgttgaatacgccttgaaagcacgtcccttgcggagatacatccccaaaaacccctaccagtacaagttctggtacgtggtgaactcttcgcctttcgaatacatgatgtttgtcctcatcatgctcaacacactctgcttggccatgcagcactacgagcagtccaagatgttcaatgatgccatggacattctgaacatggtcttcaccggggtgttcaccgtcgagatggttttgaaagtcatcgcatttaagcctaaggggtattttagtgacgcctggaacacgtttgactccctcatcgtaatcggcagcattatagacgtggccctcagcgaagcggacccaactgaaagtgaaaatgtccctgtcccaactgctacacctgggaactctgaagagagcaatagaatctccatcacctttttccgtcttttccgagtgatgcgattggtgaagcttctcagcaggggggaaggcatccggacattgctgtggacttttattaagtcctttcaggcgctcccgtatgtggccctcctcatagccatgctgttcttcatctatgcggtcattggcatgcagatgtttgggaaagttgccatgagagataacaaccagatcaataggaacaataacttccagacgtttccccaggcggtgctgctgctcttcaggtgtgcaacaggtgaggcctggcaggagatcatgctggcctgtctcccagggaagctctgtgaccctgagtcagattacaaccccggggaggagtatacatgtgggagcaactttgccattgtctatttcatcagtttttacatgctctgtgcatttctgatcatcaatctgtttgtggctgtcatcatggataatttcgactatctgacccgggactggtctattttggggcctcaccatttagatgaattcaaaagaatatggtcagaatatgaccctgaggcaaagggaaggataaaacaccttgatgtggtcactctgcttcgacgcatccagcctcccctggggtttgggaagttatgtccacacagggtagcgtgcaagagattagttgccatgaacatgcctctcaacagtgacgggacagtcatgtttaatgcaaccctgtttgctttggttcgaacggctcttaagatcaagaccgaagggaacctggagcaagctaatgaagaacttcgggctgtgataaagaaaatttggaagaaaaccagcatgaaattacttgaccaagttgtccctccagctggtgatgatgaggtaaccgtggggaagttctatgccactttcctgatacaggactactttaggaaattcaagaaacggaaagaacaaggactggtgggaaagtaccctgcgaagaacaccacaattgccctacaggcgggattaaggacactgcatgacattgggccagaaatccggcgtgctatatcgtgtgatttgcaagatgacgagcctgaggaaacaaaacgagaagaagaagatgatgtgttcaaaagaaatggtgccctgcttggaaaccatgtcaatcatgttaatagtgataggagagattcccttcagcagaccaataccacccaccgtcccctgcatgtccaaaggccttcaattccacctgcaagtgatactgagaaaccgctgtttcctccagcaggaaattcggtgtgtcataaccatcataaccataattccataggaaagcaagttcccacctcaacaaatgccaatctcaataatgccaatatgtccaaagctgcccatggaaagcggcccagcattgggaaccttgagcatgtgtctgaaaatgggcatcattcttcccacaagcatgaccgggagcctcagagaaggtccagtgtgaaaagaacccgctattatgaaacttacattaggtccgactcaggagatgaacagctcccaactatttgccgggaagacccagagatacatggctatttcagggacccccactgcttgggggagcaggagtatttcagtagtgaggaatgctacgaggatgacagctcgcccacctggagcaggcaaaactatggctactacagcagatacccaggcagaaacatcgactctgagaggccccgaggctaccatcatccccaaggattcttggaggacgatgactcgcccgtttgctatgattcacggagatctccaaggagacgcctactacctcccaccccagcatcccaccggagatcctccttcaactttgagtgcctgcgccggcagagcagccaggaagaggtcccgtcgtctcccatcttcccccatcgcacggccctgcctctgcatctaatgcagcaacagatcatggcagttgccggcctagattcaagtaaagcccagaagtactcaccgagtcactcgacccggtcgtgggccacccctccagcaacccctccctaccgggactggacaccgtgctacacccccctgatccaagtggagcagtcagaggccctggaccaggtgaacggcagcctgccgtccctgcaccgcagctcctggtacacagacgagcccgacatctcctaccggactttcacaccagccagcctgactgtccccagcagcttccggaacaaaaacagcgacaagcagaggagtgcggacagcttggtggaggcagtcctgatatccgaaggcttgggacgctatgcaagggacccaaaatttgtgtcagcaacaaaacacgaaatcgctgatgcctgtgacctcaccatcgacgagatggagagtgcagccagcaccctgcttaatgggaacgtgcgtccccgagccaacggggatgtgggccccctctcacaccggcaggactatgagctacaggactttggtcctggctacagcgacgaagagccagaccctgggagggatgaggaggacctggcggatgaaatgatatgcatcaccaccttgtagcccccagcgaggggcagactggctctggcctcaggtggggcgcaggagagccaggggaaaagtgcctcatagttaggaaagtttaggcactagttgggagtaatattcaattaattagacttttgtataagagatgtcatgcctcaagaaagccataaacctggtaggaacaggtcccaagcggttgagcctggcagagtaccatgcgctcggccccagctgcaggaaacagcaggccccgccctctcacagaggatgggtgaggaggccagacctgccctgccccattgtccagatgggcactgctgtggagtctgcttctcccatgtaccagggcaccaggcccacccaactgaaggcatggcggcggggtgcaggggaaagttaaaggtgatgacgatcatcacacctcgtgtcgttacctcagccatcggtctagcatatcagtcactgggcccaacatatccatttttaaaccctttcccccaaatacactgcgtcctggttcctgtttagctgttctgaaata

SEQ ID NO: 288 - protein, 2181 aa, Homo sapiens
MMMMMMMKKMQHQRQQQADHANEANYARGTRLPLSGEGPTSQPNSSKQTVLSWQAAIDAARQAKAAQTMSTSAPPPVGSLSQRKRQQYAKSKKQGNSSNSRPARALFCLSLNNPIRRACISIVEWKPFDIFILLAIFANCVALAIYIPFPEDDSNSTNHNLEKVEYAFLIIFTVETFLKIIAYGLLLHPNAYVRNGWNLLDFVIVIVGLFSVILEQLTKETEGGNHSSGKSGGFDVKALRAFRVLRPLRLVSGVPSLQVVLNSIIKAMVPLLHIALLVLFVIIIYAIIGLELFIGKMHKTCFFADSDIVAEEDPAPCAFSGNGRQCTANGTECRSGWVGPNGGITNFDNFAFAMLTVFQCITMEGWTDVLYWVNDAIGWEWPWVYFVSLIILGSFFVLNLVLGVLSGEFSKEREKAKARGDFQKLREKQQLEEDLKGYLDWITQAEDIDPENEEEGGEEGKRNTSMPTSETESVNTENVSGEGENRGCCGSLWCWWRRRGAAKAGPSGCRRWGQAISKSKLSRRWRRWNRFNRRRCRAAVKSVTFYWLVIVLVFLNTLTISSEHYNQPDWLTQIQDIANKVLLALFTCEMLVKMYSLGLQAYFVSLFNRFDCFVVCGGITETILVELEIMSPLGISVFRCVRLLRIFKVTRHWTSLSNLVASLLNSMKSIASLLLLLFLFIIIFSLLGMQLFGGKFNFDETQTKRSTFDNFPQALLTVFQILTGEDWNAVMYDGIMAYGGPSSSGMIVCIYFIILFICGNYILLNVFLAIAVDNLADAESLNTAQKEEAEEKERKKIARKESLENKKNNKPEVNQIANSDNKVTIDDYREEDEDKDPYPPCDVPVGEEEEEEEEDEPEVPAGPRPRRISELNMKEKIAPIPEGSAFFILSKTNPIRVGCHKLINHHIFTNLILVFIMLSSAALAAEDPIRSHSFRNTILGYFDYAFTAIFTVEILLKMTTFGAFLHKGAFCRNYFNLLDMLVVGVSLVSFGIQSSAISVVKILRVLRVLRPLRAINRAKGLKHVVQCVFVAIRTIGNIMIVTTLLQFMFACIGVQLFKGKFYRCTDEAKSNPEECRGLFILYKDGDVDSPVVRERIWQNSDFNFDNVLSAMMALFTVSTFEGWPALLYKAIDSNGENIGPIYNHRVEISIFFIIYIIIVAFFMMNIFVGFVIVTFQEQGEKEYKNCELDKNQRQCVEYALKARPLRRYIPKNPYQYKFWYVVNSSPFEYMMFVLIMLNTLCLAMQHYEQSKMFNDAMDILNMVFTGVFTVEMVLKVIAFKPKGYFSDAWNTFDSLIVIGSIIDVALSEADPTESENVPVPTATPGNSEESNRISITFFRLFRVMRLVKLLSRGEGIRTLLWTFIKSFQALPYVALLIAMLFFIYAVIGMQMFGKVAMRDNNQINRNNNFQTFPQAVLLLFRCATGEAWQEIMLACLPGKLCDPESDYNPGEEYTCGSNFAIVYFISFYMLCAFLIINLFVAVIMDNFDYLTRDWSILGPHHLDEFKRIWSEYDPEAKGRIKHLDVVTLLRRIQPPLGFGKLCPHRVACKRLVAMNMPLNSDGTVMFNATLFALVRTALKIKTEGNLEQANEELRAVIKKIWKKTSMKLLDQVVPPAGDDEVTVGKFYATFLIQDYFRKFKKRKEQGLVGKYPAKNTTIALQAGLRTLHDIGPEIRRAISCDLQDDEPEETKREEEDDVFKRNGALLGNHVNHVNSDRRDSLQQTNTTHRPLHVQRPSIPPASDTEKPLFPPAGNSVCHNHHNHNSIGKQVPTSTNANLNNANMSKAAHGKRPSIGNLEHVSENGHHSSHKHDREPQRRSSVKRTRYYETYIRSDSGDEQLPTICREDPEIHGYFRDPHCLGEQEYFSSEECYEDDSSPTWSRQNYGYYSRYPGRNIDSERPRGYHHPQGFLEDDDSPVCYDSRRSPRRRLLPPTPASHRRSSFNFECLRRQSSQEEVPSSPIFPHRTALPLHLMQQQIMAVAGLDSSKAQKYSPSHSTRSWATPPATPPYRDWTPCYTPLIQVEQSEALDQVNGSLPSLHRSSWYTDEPDISYRTFTPASLTVPSSFRNKNSDKQRSADSLVEAVLISEGLGRYARDPKFVSATKHEIADACDLTIDEMESAASTLLNGNVRPRANGDVGPLSHRQDYELQDFGPGYSDEEPDPGRDEEDLADEMICITTL

SEQ ID NO: 289 - DNA, 4187 bp, Homo sapiens
aactcccgcctcgggacgcctcggggtcgggctccggctgcggctgctgctgcggcgcccgcgctccggtgcgtccgcctcctgtgcccgccgcggagcagtctgcggcccgccgtgcgccctcagctccttttcctgagcccgccgcgatgggagctgcgcggggatccccggccagaccccgccggttgcctctgctcagcgtcctgctgctgccgctgctgggcggtacccagacagccattgtcttcatcaagcagccgtcctcccaggatgcactgcaggggcgccgggcgctgcttcgctgtgaggttgaggctccgggcccggtacatgtgtactggctgctcgatggggcccctgtccaggacacggagcggcgtttcgcccagggcagcagcctgagctttgcagctgtggaccggctgcaggactctggcaccttccagtgtgtggctcgggatgatgtcactggagaagaagcccgcagtgccaacgcctccttcaacatcaaatggattgaggcaggtcctgtggtcctgaagcatccagcctcggaagctgagatccagccacagacccaggtcacacttcgttgccacattgatgggcaccctcggcccacctaccaatggttccgagatgggacccccctttctgatggtcagagcaaccacacagtcagcagcaaggagcggaacctgacgctccggccagctggtcctgagcatagtgggctgtattcctgctgcgcccacagtgcttttggccaggcttgcagcagccagaacttcaccttgagcattgctgatgaaagctttgccagggtggtgctggcaccccaggacgtggtagtagcgaggtatgaggaggccatgttccattgccagttctcagcccagccacccccgagcctgcagtggctctttgaggatgagactcccatcactaaccgcagtcgccccccacacctccgcagagccacagtgtttgccaacgggtctctgctgctgacccaggtccggccacgcaatgcagggatctaccgctgcattggccaggggcagaggggcccacccatcatcctggaagccacacttcacctagcagagattgaagacatgccgctatttgagccacgggtgtttacagctggcagcgaggagcgtgtgacctgccttccccccaagggtctgccagagcccagcgtgtggtgggagcacgcgggagtccggctgcccacccatggcagggtctaccagaagggccacgagctggtgttggccaatattgctgaaagtgatgctggtgtctacacctgccacgcggccaacctggctggtcagcggagacaggatgtcaacatcactgtggccactgtgccctcctggctgaagaagccccaagacagccagctggaggagggcaaacccggctacttggattgcctgacccaggccacaccaaaacctacagttgtctggtacagaaaccagatgctcatctcagaggactcacggttcgaggtcttcaagaatgggaccttgcgcatcaacagcgtggaggtgtatgatgggacatggtaccgttgtatgagcagcaccccagccggcagcatcgaggcgcaagcccgtgtccaagtgctggaaaagctcaagttcacaccaccaccccagccacagcagtgcatggagtttgacaaggaggccacggtgccctgttcagccacaggccgagagaagcccactattaagtgggaacgggcagatgggagcagcctcccagagtgggtgacagacaacgctgggaccctgcattttgcccgggtgactcgagatgacgctggcaactacacttgcattgcctccaacgggccgcagggccagattcgtgcccatgtccagctcactgtggcagtttttatcaccttcaaagtggaaccagagcgtacgactgtgtaccagggccacacagccctactgcagtgcgaggcccagggggaccccaagccgctgattcagtggaaaggcaaggaccgcatcctggaccccaccaagctgggacccaggatgcacatcttccagaatggctccctggtgatccatgacgtggcccctgaggactcaggccgctacacctgcattgcaggcaacagctgcaacatcaagcacacggaggcccccctctatgtcgtggacaagcctgtgccggaggagtcggagggccctggcagccctcccccctacaagatgatccagaccattgggttgtcggtgggtgccgctgtggcctacatcattgccgtgctgggcctcatgttctactgcaagaagcgctgcaaagccaagcggctgcagaagcagcccgagggcgaggagccagagatggaatgcctcaacggagggcctttgcagaacgggcagccctcagcagagatccaagaagaagtggccttgaccagcttgggctccggccccgcggccaccaacaaacgccacagcacaagtgataagatgcacttcccacggtctagcctgcagcccatcaccacgctggggaagagtgagtttggggaggtgttcctggcaaaggctcagggcttggaggagggagtggcagagaccctggtacttgtgaagagcctgcagacgaaggatgagcagcagcagctggacttccggagggagttggagatgtttgggaagctgaaccacgccaacgtggtgcggctcctggggctgtgccgggaggctgagccccactacatggtgctggaatatgtggatctgggagacctcaagcagttcctgaggatttccaagagcaaggatgaaaaattgaagtcacagcccctcagcaccaagcagaaggtggccctatgcacccaggtagccctgggcatggagcacctgtccaacaaccgctttgtgcataaggacttggctgcgcgtaactgcctggtcagtgcccagagacaagtgaaggtgtctgccctgggcctcagcaaggatgtgtacaacagtgagtactaccacttccgccaggcctgggtgccgctgcgctggatgtcccccgaggccatcctggagggtgacttctctaccaagtctgatgtctgggccttcggtgtgctgatgtgggaagtgtttacacatggagagatgccccatggtgggcaggcagatgatgaagtactggcagatttgcaggctgggaaggctagacttcctcagcccgagggctgcccttccaaactctatcggctgatgcagcgctgctgggccctcagccccaaggaccggccctccttcagtgagattgccagcgccctgggagacagcaccgtggacagcaagccgtgaggagggagcccgctcaggatggcctgggcaggggaggacatctctagagggaagctcacagcatgatgggcaagatccctgtcctcctgggccctgaggtgccctagtgcaacaggcattgctgaggtctgagcagggcctggcctttcctcctcttcctcaccctcatcctttgggaggctgacttggacccaaactgggcgactagggctttgagctgggcagtttcccctgccacctcttcctctatcagggacagtgtgggtgccacaggtaaccccaatttctggccttcaacttctccccttgaccgggtccaactctgccactcatctgccaactttgcctggggagggctaggcttgggatgagctgggtttgtggggagttccttaatattctcaagttctgggcacacagggttaatgagtctcttgcccactggtccacttgggggtctagaccaggattatagaggacacagcaagtgagtcctccccactctgggcttgtgcacactgacccagacccacgtcttccccacccttctctcctttcctcatcctaagtgcctggcagatgaaggagttttcaggagcttttgacactatataaaccgccctttttgtatgcaccacgggcggcttttatatgtaattgcagcgtggggtgggtgggcatgggaggtaggggtgggccctggagatgaggagggtgggccatccttaccccacacttttattgttgtcgttttttgtttgttttgtttttttgtttttgtttttgtttttacactcgctgctctcaataaataagcctttttta

SEQ ID NO: 290 - protein, 1070 aa, Homo sapiens [sequence omitted]

SEQ ID NO: 291 - DNA, 3150 bp, Homo sapiens
atggggagccggacgccagagtcccctctccacgccgtgcagctgcgctggggcccccggcgccgacccccgctsstgccgctgctgttgctgctsstgccgccgccacccagggtcgggggcttcaacttagacgcggaggccccagcagtactctcggggcccccgggctccttcttcggattctcagtggagttttaccggccgggaacagacggggtcagtgtgctggtgggagcacccaaggctaataccagccagccaggagtgctgcagggtggtgctgtctacctctgtccttggggtgccagccccacacagtgcacccccattgaatttgacagcaaaggctctcggctcctggagtcctcactgtccagctcagagggagaggagcctgtggagtacaagtccttgcagtggttcggggcaacagttcgagcccatggctcctccatcttggcatgcgctccactgtacagctggcgcacagagaaggagccactgagcgaccccgtgggcacctgctacctctccacagataacttcacccgaattctggagtatgcaccctgccgctcagatttcagctgggcagcaggacagggttactgccaaggaggcttcagtgccgagttcaccaagactggccgtgtggttttaggtggaccaggaagctatttctggcaaggccagatcctgtctgccactcaggagcagattgcagaatcttattaccccgagtacctgatcaacctggttcaggggcagctgcagactcgccaggccagttccatctatgatgacagctacctaggatactctgtggctgttggtgaattcagtggtgatgacacagaagactttgttgctggtgtgcccaaagggaacctcacttacggctatgtcaccatccttaatggctcagacattcgatccctctacaacttctcaggggaacagatggcctcctactttggctatgcagtggccgccacagacgtcaatggggacgggctggatgacttgctggtgggggcacccctgctcatggatcggacccctgacgggcggcctcaggaggtgggcagggtctacgtctacctgcagcacccagccggcatagagcccacgcccacccttaccctcactggccatgatgagtttggccgatttggcagctccttgacccccctgggggacctggaccaggatggctacaatgatgtggccatcggggctccctttggtggggagacccagcagggagtagtgtttgtatttcctgggggcccaggagggctgggctctaagccttcccaggttctgcagcccctgtgggcagccagccacaccccagacttctttggctctgcccttcgaggaggccgagacctggatggcaatggatatcctgatctgattgtggggtcctttggtgtggacaaggctgtggtatacaggggccgccccatcgtgtccgctagtgcctccctcaccatcttccccgccatgttcaacccagaggagcggagctgcagcttagaggggaaccctgtggcctgcatcaaccttagcttctgcctcaatgcttctggaaaacacgttgctgactccattggtttcacagtggaacttcagctggactggcagaagcagaagggaggggtacggcgggcactgttcctggcctccaggcaggcaaccctgacccagaccctgctcatccagaatggggctcgagaggattgcagagagatgaagatctacctcaggaacgagtcagaatttcgagacaaactctcgccgattcacatcgctctcaacttctccttggacccccaagccccagtggacagccacggcctcaggccagccctacattatcagagcaagagccggatagaggacaaggctcagatcttgctggactgtggagaagacaacatctgtgtgcctgacctgcagctggaagtgtttggggagcagaaccatgtgtacctgggtgacaagaatgccctgaacctcactttccatgcccagaatgtgggtgagggtggcgcctatgaggctgagcttcgggtcaccgcccctccagaggctgagtactcaggactcgtcagacacccagggaacttctccagcctgagctgtgactactttgccgtgaaccagagccgcctgctggtgtgtgacctgggcaaccccatgaaggcaggagccagtctgtggggtggccttcggtttacagtccctcatctccgggacactaagaaaaccatccagtttgacttccagatcctcagcaagaatctcaacaactcgcaaagcgacgtggtttcctttcggctctccgtggaggctcaggcccaggtcaccctgaacggtgtctccaagcctgaggcagtgctattcccagtaagcgactggcatccccgagaccagcctcagaaggaggaggacctgggacctgctgtccaccatgtctatgagctcatcaaccaaggccccagctccattagccagggtgtgctggaactcagctgtccccaggctctggaaggtcagcagctcctatatgtgaccagagttacgggactcaactgcaccaccaatcaccccattaacccaaagggcctggagttggatcccgagggttccctgcaccaccagcaaaaacgggaagctccaagccgcagctctgcttcctcgggacctcagatcctgaaatgcccggaggctgagtgtttcaggctgcgctgtgagctcgggcccctgcaccaacaagagagccaaagtctgcagttgcatttccgagtctgggccaagactttcttgcagcgggagcaccagccatttagcctgcagtgtgaggctgtgtacaaagccctgaagatgccctaccgaatcctgcctcggcagctgccccaaaaagagcgtcaggtggccacagctgtgcaatggaccaaggcagaaggcagctatggcgtcccactgtggatcatcatcctagccatcctgtttggcctcctgctcctaggtctactcatctacatcctctacaagcttggattcttcaaacgctccctcccatatggcaccgccatggaaaaagctcagctcaagcctccagccacctctgatgcctga

SEQ ID NO: 292 - protein, 1049 aa, Homo sapiens
MGSRTPESPLHAVQLRWGPRRRPPLLPLLLLLLPPPPRVGGFNLDAEAPAVLSGPPGSFFGFSVEFYRPGTDGVSVLVGAPKANTSQPGVLQGGAVYLCPWGASPTQCTPIEFDSKGSRLLESSLSSSEGEEPVEYKSLQWFGATVRAHGSSILACAPLYSWRTEKEPLSDPVGTCYLSTDNFTRILEYAPCRSDFSWAAGQGYCQGGFSAEFTKTGRVVLGGPGSYFWQGQILSATQEQIAESYYPEYLINLVQGQLQTRQASSIYDDSYLGYSVAVGEFSGDDTEDFVAGVPKGNLTYGYVTILNGSDIRSLYNFSGEQMASYFGYAVAATDVNGDGLDDLLVGAPLLMDRTPDGRPQEVGRVYVYLQHPAGIEPTPTLTLTGHDEFGRFGSSLTPLGDLDQDGYNDVAIGAPFGGETQQGVVFVFPGGPGGLGSKPSQVLQPLWAASHTPDFFGSALRGGRDLDGNGYPDLIVGSFGVDKAVVYRGRPIVSASASLTIFPAMFNPEERSCSLEGNPVACINLSFCLNASGKHVADSIGFTVELQLDWQKQKGGVRRALFLASRQATLTQTLLIQNGAREDCREMKIYLRNESEFRDKLSPIHIALNFSLDPQAPVDSHGLRPALHYQSKSRIEDKAQILLDCGEDNICVPDLQLEVFGEQNHVYLGDKNALNLTFHAQNVGEGGAYEAELRVTAPPEAEYSGLVRHPGNFSSLSCDYFAVNQSRLLVCDLGNPMKAGASLWGGLRFTVPHLRDTKKTIQFDFQILSKNLNNSQSDVVSFRLSVEAQAQVTLNGVSKPEAVLFPVSDWHPRDQPQKEEDLGPAVHHVYELINQGPSSISQGVLELSCPQALEGQQLLYVTRVTGLNCTTNHPINPKGLELDPEGSLHHQQKREAPSRSSASSGPQILKCPEAECFRLRCELGPLHQQESQSLQLHFRVWAKTFLQREHQPFSLQCEAVYKALKMPYRILPRQLPQKERQVATAVQWTKAEGSYGVPLWIIILAILFGLLLLGLLIYILYKLGFFKRSLPYGTAMEKAQLKPPATSDA

SEQ ID NO: 293 - DNA, 1373 bp, Homo sapiens
gggggcgccgcgcgctgaccctccctgggcaccgctggggacgatggcgctgctcgccttgctgctggtcgtggccctaccgcgggtgtggacagacgccaacctgactgcgagacaacgagatccagaggactcccagcgaacggacgagggtgacaatagagtgtggtgtcatgtttgtgagagagaaaacactttcgagtgccagaacccaaggaggtgcaaatggacagagccatactgcgttatagcggccgtgaaaatatttccacgttttttcatggttgcgaagcagtgctccgctggttgtgcagcgatggagagacccaagccagaggagaagcggtttctcctggaagagcccatgcccttcttttacctcaagtgttgtaaaattcgctactgcaatttagaggggccacctatcaactcatcagtgttcaaagaatatgctgggagcatgggtgagagctgtggtgggctgtggctggccatcctcctgctgctggcctccattgcagccggcctcagcctgtcttgagccacgggactgccacagactgagccttccggagcatggactcgctccagaccgttgtcacctgttgcattaaacttgttttctgttgattacctcttggtttgacttcccagggtcttgggatgggagagtggggatcaggtgcagttggctcttaaccctcaagggttctttaactcacattcagaggaagtccagatctcctgagtagtgattttggtgacaagtttttctctttgaaatcaaaccttgtaactcatttattgctgatggccactcttttccttgactcccctctgcctctgagggcttcagtattgatggggagggaggcctaagtaccactcatggagagtatgtgctgagatgcttccgacctttcaggtgacgcaggaacactgggggagtctgaatgattggggtgaagacatccctggagtgaaggactcctcagcatggggggcagtggggcacacgttagggctgcccccattccagtggtggaggcgctgtggatggctgcttttcctcaacctttcctaccagattccaggaggcagaagataactaattgtgttgaagaaacttagacttcacccaccagctggcacaggtgcacagattcataaattcccacacgtgtgtgttcaacatctgaaacttaggccaagtagagagcatcagggtaaatggcgttcatttctctgttaagatgcagccatccatggggagctgagaaatcagactcaaagttccaccaaaaacaaatacaaggggacttcaaaagttcacgaaaaaaaaaaaaaaaaaaaaaaaaaaaaaaaaaaaaaaa

SEQ ID NO: 294 - protein, 165 aa, Homo sapiens
MALLALLLVVALPRVWTDANLTARQRDPEDSQRTDEGDNRVWCHVCERENTFECQNPRRCKWTEPYCVIAAVKIFPRFFMVAKQCSAGCAAMERPKPEEKRFLLEEPMPFFYLKCCKIRYCNLEGPPINSSVFKEYAGSMGESCGGLWLAILLLLASIAAGLSLS

1-70. (canceled)

71. A method of detecting a prostate cancer-associated transcript in a cell from a patient, comprising:
providing a biological sample from the patient; and
contacting the biological sample with a polynucleotide that selectively hybridizes to a sequence at least 80% identical to a sequence as shown in Table 10.

72. The method of claim 71, wherein the polynucleotide selectively hybridizes to a sequence at least 95% identical to a sequence as shown in Table 10.

73. The method of claim 71, wherein the biological sample is a tissue sample.

74. The method of claim 71, wherein the biological sample comprises isolated nucleic acids, and the method further comprises amplifying the nucleic acids before the step of contacting the biological sample with the polynucleotide.

75. The method of claim 71, wherein the polynucleotide comprises a sequence as shown in Table 10.

76. The method of claim 71, wherein the polynucleotide is labeled.

77. The method of claim 71, wherein the polynucleotide is immobilized on a solid surface.

78. The method of claim 71, wherein the patient is undergoing a therapeutic regimen to treat prostate cancer and/or is suspected of having prostate cancer.

79. A method of monitoring the efficacy of a therapeutic treatment of prostate cancer, comprising:
providing a biological sample from a patient undergoing the therapeutic treatment; and
determining the level of a prostate cancer-associated item in the biological sample by:
(a) contacting the biological sample with a contact polynucleotide that selectively hybridizes to a sequence at least 80% identical to a sequence as shown in Table 10, wherein the prostate cancer-associated item is a transcript, or
(b) contacting the biological sample with a contact polypeptide encoded by a polynucleotide that selectively hybridizes to a sequence at least 80% identical to a sequence as shown in Table 10, wherein the prostate cancer-associated item is an antibody and the contact polypeptide specifically binds to the antibody, or
(c) contacting the biological sample with a contact antibody, wherein the contact antibody specifically binds to a polypeptide encoded by a polynucleotide that selectively hybridizes to a sequence at least 80% identical to a sequence as shown in Table 10, wherein the prostate cancer-associated item is a polypeptide.

80. The method of claim 79, wherein the biological sample, is contacted with the contact polynucleotide, the method further comprising comparing the level of the prostate cancer-associated transcript to a level of the prostate cancer-associated transcript in a biological sample from the patient prior to, or earlier in, the therapeutic treatment.

81. The method of claim 79, wherein the biological sample is contacted with the contact polypeptide, the method further comprising comparing the level of the prostate cancer-associated antibody to a level of the prostate cancer-associated antibody in a biological sample from the patient prior to, or earlier in, the therapeutic treatment.

82. The method of claim 79, wherein the biological sample is contacted with the contact antibody, the method further comprising comparing the level of the prostate cancer-associated polypeptide to a level of the prostate cancer-associated polypeptide in a biological sample from the patient prior to, or earlier in, the therapeutic treatment.

83. An isolated nucleic acid molecule consisting essentially of a polynucleotide sequence as shown in Table 10.

84. An expression vector comprising a polynucleotide sequence as shown in Table 10.

85. A host cell comprising an expression vector comprising a polynucleotide sequence as shown in Table 10.

86. An isolated polypeptide which is encoded by a nucleic acid molecule having a polynucleotide sequence as shown in Table 10.

87. An antibody that specifically binds a polypeptide which is encoded by a nucleic acid molecule having a polynucleotide sequence as shown in Table 10.

88. The antibody of claim 87 or a fragment thereof, further conjugated to an effector component selected from the group consisting of a fluorescent label, a radioisotope, a cytotoxic chemical and combinations thereof.

89. A method for identifying a compound that modulates a prostate cancer-associated polypeptide, comprising:
contacting the compound with a prostate cancer-associated polypeptide, the polypeptide encoded by a polynucleotide that selectively hybridizes to a sequence at least 80% identical to a sequence as shown in Table 10; and
determining the functional effect of the compound upon the polypeptide,
wherein the functional effect is a physical effect, a chemical effect or a combination thereof.

90. A method of inhibiting proliferation of a prostate cancer-associated cell to treat prostate cancer in a patient, comprising:
providing a compound obtained from the method of claim 89; and
administering to the subject a therapeutically effective amount of the compound.

91. A method for drug screening, comprising:
administering a test compound to a mammal having prostate cancer or a cell isolated therefrom; and
comparing the level of gene expression of a polynucleotide that selectively hybridizes to a sequence at least 80% identical to a sequence as shown in Table 10 in a treated cell or mammal with the level of gene expression of the polynucleotide in a control cell or mammal,
wherein a test compound that modulates the level of expression of the polynucleotide is a candidate for the treatment of prostate cancer.

92. A method for treating a mammal having prostate cancer, comprising:
providing a compound identified by the method of claim 91; and
administering a therapeutically effective amount of the compound to the mammal.

93. A pharmaceutical composition for treating a mammal having prostate cancer, comprising:
a compound identified by the method of claim 91; and
a physiologically acceptable excipient.

94. A biochip comprising a plurality of polynucleotides that selectively hybridize to a sequence at least 80% identical to a sequence as shown in Table 10.
